(19) United States
(12) Patent Application Publication
(10) Pub. No.: US 2009/0123924 A1
(43) Pub. Date: May 14, 2009

(54) Method for Breast Cancer Diagnosis

(75) Inventors: Alexander Krause, Lyon (FR); Philippe Leissner, Lyon (FR); Bruno Mougin, Lyon (FR); Malick Paye, Grenoble (FR)

Correspondence Address: OLIFF & BERRIDGE, PLC, P.O. BOX 320850, ALEXANDRIA, VA, 22320-4850, US

(73) Assignee: Biomerieux, Marcy L'Etoile (FR)

(21) Appl. No.: 11/988,364

(22) PCT Filed: Jul. 5, 2006
(86) PCT No.: PCT/FR2006/001593

§ 371 Date: Jan. 7, 2008

(30) Foreign Application Priority Data
Jul. 7, 2005 (FR) 0552087

(51) Int. Cl. C12Q 1/68; C07H 21/04

(52) U.S. Cl. 435/6; 536/24.31

(57) ABSTRACT

The invention relates to a method for the in vitro diagnosis of breast cancer in a patient who may be suffering from a breast cancer, characterized in that it comprises the following steps:
a) biological material is extracted from a biological sample taken from the patient,
b) the biological material is brought into contact with at least 8 specific reagents chosen from the specific reagents for the target genes with a nucleic sequence having any one of SEQ ID Nos. 1 to 8,
c) the expression of said target genes is determined.

[0001] The present invention relates to the cancerology field. More particularly, the invention relates to a method for breast cancer diagnosis.

[0002] In women, breast cancer is the leading cause of mortality due to cancer in industrialized countries. Age is the most important risk factor. Thus, the risk increases by 0.5% per year of age in countries in the West. Other risk factors are known, such as the number of pregnancies and the age at the time of the first pregnancy, breast-feeding, the age at puberty and at the menopause, estrogenic treatments after the menopause has occurred, stress and nutrition.

[0003] Breast cancer diagnosis is generally carried out by mammography. However, it is estimated that the minimum size of a tumor that can be detected by mammography is 1 cm, which means that the tumor has an evolutive past of 8 years, on average, at the time of diagnosis. In addition, the early detection of a tumor is all the more important because small tumors are much less malignant than what can be extrapolated from their sizes: the aggressiveness of large tumors does not come only from their size, but also from their “inherent aggressiveness”, which increases with the age of a tumor (Bucchi et al., Br J Cancer 2005, p. 156-161; Norden T, Eur J Cancer 1997, p. 624-628). The analysis of the expression of a panel of target genes is also relevant in combating breast cancer, and mention may in particular be made of the analysis of a panel of 176 genes, which is expressed differentially between patients expressing the ER receptor and patients not expressing the ER receptor (Bertucci et al., Human Molecular Genetics, 2000; 9: 2981-2991). Mention may also be made of the analysis of a panel of 37 genes which makes it possible to make an early diagnosis of the breast cancer (Sharma et al., Breast cancer Research 2005, 7:R634—R644). However, all the patients had a suspect initial mammogram. This gene panel could be unsuitable for a routine diagnostic test for breast cancer prior to any mammography.

[0004] It is therefore very useful to have a tool for making a very early breast cancer diagnosis.

[0005] The present invention proposes a novel method for breast cancer diagnosis, which makes it possible to distinguish patients suffering from a breast cancer very early, but also at an advanced stage. The analysis of the expression of these target genes can be carried out directly using a blood sample, which makes it possible to avoid serious or detrimental procedures, and the uncertainties associated with the taking of a sample during these procedures. Since peripheral blood is the most clinically accessible interior compartment, the use of this source in particular allows a routine diagnosis, which is less restricting than mammography, to be carried out.

[0006] Before proceeding with the disclosure of the invention, the following definitions, which apply for all the variants of the invention, should be given.

[0007] For the purpose of the present invention, the term “biological sample” is intended to mean any sample taken from a patient and liable to contain a biological material as defined hereinafter. This biological sample may in particular be a blood, serum, saliva, tissue, tumor or bone marrow sample or a sample of circulating cells from the patient. This biological sample is obtained by any means for taking a sample known to those skilled in theart.

[0008] For the purpose of the present invention, the term “biological material” is intended to mean any material which makes it possible to detect the expression of a target gene. The biological material may in particular comprise proteins, or nucleic acids such as, in particular, deoxyribonucleic acids (DNA) or ribonucleic acids (RNA). The nucleic acid may in particular be an RNA (ribonucleic acid). According to a preferred embodiment of the invention, the biological material comprises nucleic acids, preferably RNA, and even more preferably total RNA. Total RNA comprises transfer RNA, messenger RNA (mRNA), such as the mRNA transcribed from the target gene, but also transcribed from any other gene, and ribosomal RNA. This biological material comprises material specific for a target gene, such as in particular the mRNA transcribed from the target gene or the proteins derived from this mRNA, but may also comprise material not specific for a target gene, such as in particular the mRNA transcribed from a gene other than the target gene, the tRNA, or the rRNA derived from genes other than the target gene.

[0009] During step a) of the method according to the invention, the biological material is extracted from the biological sample by any of the protocols for extracting and purifying nucleic acids well known to those skilled in the art. By way of indication, the nucleic acid extraction can be carried out by means of:
[0010] a step for lysis of the cells present in the biological sample, in order to release the nucleic acids contained in the cells from the patient. By way of example, the lysis methods as described in patent applications WO 00/05338 (mixed magnetic and mechanical lysis), WO 99/53304 (electrical lysis) and WO 99/15321 (mechanical lysis) can be used. Those skilled in the art may use other well known methods of lysis, such as thermal or osmotic shocks or chemical lysis with chaotropic agents such as guanidinium salts (U.S. Pat. No. 5,234,809).
[0011] a purification step which makes it possible to separate the nucleic acids from the other cellular constituents released during the lysis step. This step generally makes it possible to concentrate the nucleic acids and can be adapted to the purification of DNA or RNA. By way of example, use may be made of magnetic particles optionally coated with oligonucleotides, by adsorption or covalence (see, in this respect, U.S. Pat. No. 4,672,040 and U.S. Pat. No. 5,750,338), and the nucleic acids which are bound to these magnetic particles can thus be purified by means of a washing step. This nucleic acid purification step is particularly advantageous if it is desired to subsequently amplify said nucleic acids. A particularly advantageous embodiment of these magnetic particles is described in patent applications: WO-A-97/45202 and WO-A-99/35500. Another advantageous example of a nucleic acid purification method is the use of silica, either in the form of a column, or in the form of inert particles (Boom R. et al., J. Clin. Microbiol., 1990, n^{o} 28(3), p. 495-503) or magnetic particles (Merck: MagPrep® Silica, Promega: MagneSil™ Paramagnetic particles). Other very widely used methods are based on ion exchange resins in a column or in a paramagnetic particulate format (Whatman: DEAE-Magarose) (Levison P R et al., J. Chromatography, 1998, p. 337-344). Another method which is very relevant but not exclusive for the invention is that of adsorption onto a metal oxide support (from the company Xtrana: Xtra-Bind™ matrix). When it is desired to specifically extract the DNA from a biological sample, an extraction with phenol, chloroform and alcohol can in particular be carried out in order to remove the proteins, and the DNA can be precipitated with 100% ethanol. The DNA can then be pelleted by centrifugation, washed and redissolved. When it is desired to specifically extract the RNA from a biological sample, an extraction with phenol, chloroform and alcohol can in particular be carried out in order to remove the proteins and the RNA can be precipitated with 100% ethanol.

[0012] The RNA can then be pelleted by centrifugation, washed and redissolved. During step b, and for the purposes of the present invention, the term “specific reagent” is intended to mean a reagent which, when it is brought into contact with biological material as defined above, binds with the material specific for said target gene. By way of indication, when the specific reagent and the biological material are of nucleic origin, bringing the specific reagent into contact with the biological material allows the specific reagent to hybridize with the material specific for the target gene. The term “hybridization” is intended to mean the process during which, under suitable conditions, two nucleotide fragments bind with stable and specific hydrogen bonds so as to form a double-stranded complex. These hydrogen bonds form between the complementary adenine (A) and thymine (T) (or uracil (U)) bases (this is then referred to as an A-T bond) or between the complementary guanine (G) and cytosine (C) bases (this is then referred to as a G-C bond). The hybridization of two nucleotide fragments may be total (reference is then made to complementary nucleotide fragments or sequences), i.e. the double-stranded complex obtained during this hybridization comprises only A-T bonds and C-G bonds. This hybridization may be partial (reference is then made to sufficiently complementary nucleotide fragments or sequences), i.e. the double-stranded complex obtained comprises A-T bonds and C-G bonds allowing the double-stranded complex to form, but also bases not bonded to a complementary base. The hybridization between two nucleotide fragments depends on the working conditions which are used, and in particular on the stringency. The stringency is defined in particular according to the base composition of the two nucleotide fragments, and also by the degree of mismatching between two nucleotide fragments. The stringency may also depend on the reaction parameters, such as the concentration and the type of ionic species present in the hybridization solution, the nature and the concentration of denaturing agents and/or the hybridization temperature. All these data are well known and the appropriate conditions can be determined by those skilled in the art. In general, according to the length of the nucleotide fragments that it is desired to hybridize, the hybridization temperature is between approximately 20 and 70° C., in particular between 35 and 65° C., in a saline solution at a concentration of approximately 0.5 to 1 M. A sequence, or nucleotide fragment, or oligonucleotide, or polynucleotide is a series of nucleotide motifs assembled together by phosphoric ester bonds, characterized by the informational sequence of the natural nucleic acids, capable of hybridizing to a nucleotide fragment, it being possible for the series to contain monomers of different structures and to be obtained from a natural nucleic acid molecule and/or by genetic recombination and/or by chemical synthesis. A motif is derived from a monomer which may be a natural nucleotide of a nucleic acid, the constitutive elements of which are a sugar, a phosphate group and a nitrogenous base; in DNA, the sugar is deoxy-2-ribose, in RNA, the sugar is ribose; depending on whether it is a question of DNA or RNA, the nitrogenous base is chosen from adenine, guanine, uracil, cytosine and thymine; or else the monomer is a nucleotide modified in at least one of the three constitutive elements: by way of example, the modification may occur either at the level of the bases, with modified bases such as inosine, methyl-5-deoxycytidine, deoxyuridine, dimethylamino-5-deoxyuridine, diamino-2,6-purine, bromo-5-deoxyuridine or any other modified base capable of hybridization, or at the level of the sugar, for example the replacement of at least one deoxyribose with a polyamide (P. E. Nielsen et al., Science, 254, 1497-1500 (1991)), or else at the level of the phosphate group, for example replacement thereof with esters chosen in particular from diphosphates, alkyl and aryl phosphonates and phosphorothioates.

[0013] For the purpose of the present invention, the specific reagent is an amplification primer. For the purpose of the present invention, the term “amplification primer” is intended to mean a nucleotide fragment comprising from 5 to 100 nucleic motifs, preferably from 15 to 30 nucleic motifs, allowing the initiation of an enzymatic polymerization, such as, in particular, an enzymatic amplification reaction. The term “enzymatic amplification reaction” is intended to mean a process which generates multiple copies of a nucleotide fragment through the action of at least one enzyme. Such amplification reactions are well known to those skilled in the art and mention may in particular be made of the following techniques:
[0014] PCR (polymerase chain reaction), as described in U.S. Pat. No. 4,683,195, U.S. Pat. No. 4,683,202 and U.S. Pat. No. 4,800,159,
[0015] LCR (ligase chain reaction), disclosed, for example, in patent application EP 0 201 184,
[0016] RCR (repair chain reaction), described in patent application WO 90/01069,
[0017] 3SR (self sustained sequence replication) with patent application WO 90/06995,
[0018] NASBA (nucleic acid sequence-based amplification) with patent application WO 91/02818, and
[0019] TMA (transcription-mediated amplification) with U.S. Pat. No. 5,399,491.

[0020] When the enzymatic amplification is a PCR, the specific reagent comprises at least two amplification primers, specific for a target gene, which allow the amplification of the target gene-specific material. The target gene-specific material then preferably comprises a complementary DNA obtained by reverse transcription of messenger RNA derived from the target gene (reference is then made to target gene-specific cDNA) or a complementary RNA obtained by transcription of the cDNAs specific for a target gene (reference is then made to target gene-specific cRNA). When the enzymatic amplification is a PCR carried out after a reverse transcription reaction, this is referred to as RT-PCR.

The specific reagent may also be a hybridization probe. The term “hybridization probe” is intended to mean a nucleotide fragment comprising at least 5 nucleic motifs, preferably from 5 to 100 nucleic motifs, even more preferably from 10 to 35 nucleic motifs, having a hybridization specificity under given conditions so as to form a hybridization complex with the material specific for a target gene. In the present invention, the target gene-specific material may be a nucleotide sequence included in a messenger RNA derived from the target gene (reference is then made to target gene-specific mRNA), a nucleotide sequence included in a complementary DNA obtained by reverse transcription of said messenger RNA (reference is then made to target gene-specific cDNA), or else a nucleotide sequence included in a complementary RNA obtained by transcription of said cDNA as described above (reference will then be made to target gene-specific cRNA). The hybridization probe may comprise a label for its detection. The term “detection” is intended to mean either a direct detection by a physical method, or an indirect detection by a detection method using a label. Many detection methods exist for the detection of nucleic acids [see, for example, Kricka et al., Clinical Chemistry, 1999, n^{o} 45(4), p. 453-458 or Keller G. H. et al., DNA Probes, 2nd Ed., Stockton Press, 1993, sections 5 and 6, p. 173-249]. The term “label” is intended to mean a tracer capable of generating a signal that can be detected. A nonlimiting list of these tracers includes enzymes which produce a signal detectable, for example, by colorimetry, fluorescence or luminescence, such as horseradish peroxidase, alkaline phosphatase, beta-galactosidase or glucose-6-phosphate dehydrogenase; chromophores such as fluorescent, luminescent or dye compounds; electron dense groups detectable by electron microscopy or by their electrical properties such as conductivity, by amperometry or voltametry methods, or by impedance measurements; groups that can be detected by optical methods such as diffraction, surface plasmon resonance, contact angle variation or by physical methods such as atomic force spectroscopy, tunnel effect, etc.; radioactive molecules such as ³²P, ³⁵S or ¹²⁵I.

[0021] For the purpose of the present invention, the hybridization probe may be a “detection” probe. In this case, the “detection” probe is labeled with a label as defined above. The detection probe may in particular be a “molecular beacon” detection probe as described by Tyagi & Kramer (Nature Biotechnol., 1996, 14:303-308). These “molecular beacons” become fluorescent during hybridization. They have a stem-loop structure and contain a fluorophore and a quencher group. The binding of the specific loop sequence with its complementary target nucleic acid sequence causes the stem to uncoil and a fluorescent signal to be emitted during excitation at the appropriate wavelength.

[0022] For the detection of the hybridization reaction, use may be made of target sequences that have been labeled directly (in particular by the incorporation of a label within the target sequence) or indirectly (in particular using a detection probe as defined above) the target sequence. A step for labeling and/or cleaving the target sequence can in particular be carried out before the hybridization step, for example using a labeled deoxyribonucleotide triphosphate during the enzymatic amplification reaction. The cleavage can be carried out in particular through the action of imidazole and manganese chloride. The target sequence can also be labeled after the amplification step, for example by hybridizing a detection probe according to the sandwich hybridization technique described in document WO 91/19812. Another specific preferred method for labeling nucleic acids is described in application FR2780 059.

[0023] The hybridization probe may also be a “capture” probe. In this case, the “capture” probe is immobilized or immobilizable on a solid support by any appropriate means, i.e. directly or indirectly, for example by covalence or adsorption. As solid support, use may be made of synthetic materials or natural materials, optionally chemically modified, in particular polysaccharides such as cellulose-based materials, for example paper, cellulose derivatives such as cellulose acetate or nitrocellulose, or dextran, polymers, copolymers, in particular based on styrene-type monomers, natural fibers such as cotton, and synthetic fibers such as nylon; mineral materials such as silica, quartz, glasses, ceramics; latices; magnetic particles; metal derivatives, gels, etc. The solid support may be in the form of a microtitration plate, of a membrane as described in application WO-A-94/12670, or of a particle. Several different capture probes, each being specific for a target gene, can also be immobilized on the support. In particular, a biochip on which a large number of probes can be immobilized may be used as support. The term “biochip” is intended to mean a solid support which is small in size and to which are attached a multitude of capture probes at predetermined positions. The biochip, or DNA chip, concept dates from the beginning of the 1990s. It is based on a multidisciplinary technology which integrates microelectronics, nucleic acid chemistry, image analysis and information technology. The operating principle is based on a foundation of molecular biology: the hybridization phenomenon, i.e. the pairing, by complementarity, of the bases of two DNA and/or RNA sequences. The biochip method is based on the use of capture probes attached to a solid support, on which probes a sample of target nucleotide fragments directly or indirectly labeled with fluorochromes is made to act. The capture probes are positioned specifically on the substrate or chip and each hybridization gives a specific piece of information, in relation to the target nucleotide fragment. The pieces of information obtained are cumulative, and make it possible, for example, to quantify the level of expression of one or more target genes. In order to analyze the expression of a target gene, a biochip carrying a very large number of probes which correspond to all or part of the target gene, which is transcribed to mRNA, can then be prepared. The cDNAs or cRNAs specific for a target gene that it is desired to analyze are then hybridized, for example, on specific capture probes. After hybridization, the support or chip is washed and the labeled cDNA or cRNA/capture probe complexes are revealed by means of a high-affinity ligand bound, for example, to a fluorochrome-type label. The fluorescence is read, for example, with a scanner and the analysis of the fluorescence is processed by information technology. By way of indication, mention may be made of the DNA chips developed by the company Affymetrix (“Accessing Genetic Information with High-Density DNA arrays”, M. Chee et al., Science, 1996, 274, 610-614. “Light-generated oligonucleotide arrays for rapid DNA sequence analysis”, A. Caviani Pease et al., Proc. Natl. Acad. Sci. USA, 1994, 91, 5022-5026), for molecular diagnoses. In this technology, the capture probes are generally small in size, around 25 nucleotides. Other examples of biochips are given in the publications by G. Ramsay, Nature Biotechnology, 1998, n^{o} 16, p. 40-44; F. Ginot, Human Mutation, 1997, n^{o} 10, p. 1-10; J. Cheng et al., Molecular diagnosis, 1996, n^{o} 1(3), p. 183-200; T. Livache et al., Nucleic Acids Research, 1994, n^{o} 22(15), p. 2915-2921; J. Cheng et al., Nature Biotechnology, 1998, n^{o} 16, p. 541-546 or in U.S. Pat. No. 4,981,783, U.S. Pat. No. 5,700,637, U.S. Pat. No. 5,445,934, U.S. Pat. No. 5,744,305 and U.S. Pat. No. 5,807,522. The main characteristic of the solid support should be to conserve the hybridization characteristics of the capture probes on the target nucleotide fragments while at the same time generating a minimum background noise for the method of detection.

[0024] Three main types of fabrication can be distinguished for immobilizing the probes on the support.

[0025] First of all, there is a first technique which consists in depositing presynthesized probes. The attachment of the probes is carried out by direct transfer, by means of micropipettes or of microdots or by means of an inkjet device. This technique allows the attachment of probes having a size ranging from a few bases (5 to 10) up to relatively large sizes of 60 bases (printing) to a few hundred bases (microdeposition): Printing is an adaptation of the method used by inkjet printers. It is based on the propulsion of very small spheres of fluid (volume<1 nl) at a rate that may reach 4000 drops/second. The printing does not involve any contact between the system releasing the fluid and the surface on which it is deposited.

[0026] Microdeposition consists in attaching long probes of a few tens to several hundred bases to the surface of a glass slide. These probes are generally extracted from databases and are in the form of amplified and purified products. This technique makes it possible to produce chips called microarrays that carry approximately ten thousand spots, called recognition zones, of DNA on a surface area of a little less than 4 cm². The use of nylon membranes, referred to as “macroarrays”, which carry products that have been amplified, generally by PCR, with a diameter of 0.5 to 1 mm and the maximum density of which is 25 spots/cm², should not however be forgotten. This very flexible technique is used by many laboratories. In the present invention, the latter technique is considered to be included among biochips. A certain volume of sample can, however, be deposited at the bottom of a microtitration plate, in each well, as in the case in patent applications WO-A-00/71750 and FR 00/14896, or a certain number of drops that are separate from one another can be deposited at the bottom of one and the same Petri dish, according to another patent application, FR00/14691.

[0027] The second technique for attaching the probes to the support or chip is called in situ synthesis. This technique results in the production of short probes directly at the surface of the chip. It is based on in situ oligonucleotide synthesis (see, in particular, patent applications WO 89/10977 and WO 90/03382), and is based on the oligonucleotide synthesizer process. It consists in moving a reaction chamber, in which the oligonucleotide extension reaction takes place, along the glass surface.

[0028] Finally, the third technique is called photolithography, which is a process that is responsible for the biochips developed by Affymetrix. It is also an in situ synthesis. Photolithography is derived from microprocessor techniques. The surface of the chip is modified by the attachment of photolabile chemical groups that can be light-activated. Once illuminated, these groups are capable of reacting with the 3′ end of an oligonucleotide. By protecting this surface with masks of defined shapes, it is possible to selectively illuminate and therefore activate areas of the chip where it is desired to attach one or other of the four nucleotides. The successive use of various masks makes it possible to alternate cycles of protection/reaction and therefore to produce the oligonucleotide probes on spots of approximately a few tens of square micrometers (μm²). This resolution makes it possible to create up to several hundred thousand spots on a surface area of a few square centimeters (cm²). Photolithography has advantages: in bulk in parallel, it makes it possible to create a chip of N-mers in only 4×N cycles. All these techniques can be used with the present invention.

[0029] For the purpose of the present invention, the determination of the expression (step c) of the method according to the invention) of a target gene can be carried out by any of the protocols known to those skilled in the art.

[0030] In general, the expression of a target gene can be analyzed by detection of the mRNAs (messenger RNAs) which are transcribed from the target gene at a given instant or by the detection of the proteins derived from these mRNAs.

[0031] When the specific reagent is an amplification primer, the expression of a target gene can be determined in the following way:

[0032] 1) after having extracted, as biological material, the total RNA (comprising the transfer RNAs (tRNAs), the ribosomal RNAs (rRNAs) and the messenger RNAs (mRNAs)) from a biological sample as presented above, a reverse transcription step is carried out in order to obtain the complementary DNAs (or cDNAs) of said mRNAs. By way of indication, this reverse transcription reaction can be carried out using a reverse transcriptase enzyme which makes it possible to obtain, from an RNA fragment, a complementary DNA fragment. The reverse transcriptase enzyme originating from AMV (avian myoblastosis virus) or from MMLV (moloney murine leukemia virus) can in particular be used. When it is more particularly desired to obtain only the cDNAs of the mRNAs, this reverse transcription step is carried out in the presence of nucleotide fragments comprising only thymine bases (polyT), which hybridize by complementarity on the polyA sequence of the mRNAs so as to form a polyT-polyA complex which then serves as a starting point for the reverse transcription reaction carried out by the reverse transcriptase enzyme. cDNAs complementary to the mRNAs derived from a target gene (target gene-specific cDNA) and cDNAs complementary to the mRNAs derived from genes other than the target gene (cDNAs not specific for the target gene) are then obtained.

[0033] 2) the amplification primer(s) specific for a target gene is (are) brought into contact with the target gene-specific cDNAs and the cDNAs not specific for the target gene. The amplification primer(s) specific for a target gene hybridize(s) with the target gene-specific cDNAs and a predetermined region, of known length, of the cDNAs originating from the mRNAs derived from the target gene is specifically amplified. The cDNAs not specific for the target gene are not amplified, whereas a large amount of target gene-specific cDNAs is then obtained. For the purpose of the present invention, reference is made, without distinction, to “target gene-specific cDNAs” or to “cDNAs originating from the mRNAs derived from the target gene”. This step can be carried out in particular by means of a PCR-type amplification reaction or by any other amplification technique as defined above. By PCR, it is also possible to simultaneously amplify several different cDNAs, each one being specific for various target genes, by using several pairs of different amplification primers, each one being specific for a target gene: reference is then made to multiplex amplification.

[0034] 3) the expression of the target gene is determined by detecting and quantifying the target gene-specific cDNAs obtained in step 2) above. This detection can be carried out after electrophoretic migration of the target gene-specific cDNAs according to their size. The gel and the migration medium can include ethydium bromide so as to allow direct detection of the target gene-specific cDNAs when the gel is placed, after a given migration period, on a UV (ultraviolet)-ray light table, through the emission of a light signal. The greater the amount of target gene-specific cDNAs, the brighter this light signal. These electrophoresis techniques are well known to those skilled in the art. The target gene-specific cDNAs can also be detected and quantified using a quantification range obtained by means of an amplification reaction carried out until saturation. In order to take into account the variability and enzymatic efficiency that may be observed during the various steps (reverse transcription, PCR, etc.), the expression of a target gene of various groups of patients can be normalized by simultaneously determining the expression of a “housekeeping” gene, the expression of which is similar in the various groups of patients. By realizing a ratio of the expression of the target gene to the expression of the housekeeping gene, i.e. by realizing a ratio of the amount of target gene-specific cDNAs to the amount of housekeeping gene-specific cDNAs, any variability between the various experiments is thus corrected. Those skilled in the art may refer in particular to the following publications: Bustin S A, J Mol Endocrinol, 2002, 29: 23-39; Giulietti A Methods, 2001, 25: 386-401.

[0035] When the specific reagent is a hybridization probe, the expression of a target gene can be determined in the following way:

[0036] 1) after having extracted, as biological material, the total RNA from a biological sample as presented above, a reverse transcription step is carried out as described above in order to obtain cDNAs complementary to the mRNAs derived from a target gene (target gene-specific cDNA) and cDNAs complementary to the mRNAs derived from genes other than the target gene (cDNA not specific for the target gene).

[0037] 2) all the cDNAs are brought into contact with a support, on which are immobilized capture probes specific for the target gene whose expression it is desired to analyze, in order to carry out a hybridization reaction between the target gene-specific cDNAs and the capture probes; the cDNAs not specific for the target gene do not hybridize to the capture probes. The hybridization reaction can be carried out on a solid support which includes all the materials as indicated above. According to a preferred embodiment, the hybridization probe is immobilized on a support. Preferably, the support is a biochip. The hybridization reaction can be preceded by a step of enzymatic amplification of the target gene-specific cDNAs as described above, so as to obtain a large amount of target gene-specific cDNAs and to increase the probability of a target gene-specific cDNA hybridizing to a capture probe specific for the target gene. The hybridization reaction may also be preceded by a step for labeling and/or cleaving the target gene-specific cDNAs as described above, for example using a labeled deoxyribonucleotide triphosphate for the amplification reaction. The cleavage can be carried out in particular by the action of imidazole and manganese chloride. The target gene-specific cDNA can also be labeled after the amplification step, for example by hybridizing a labeled probe according to the sandwich hybridization technique described in document WO-A-91/19812. Other preferred specific methods for labeling and/or cleaving nucleic acids are described in applications WO 99/65926, WO 01/44507, WO 01/44506, WO 02/090584 and WO 02/090319.

[0038] 3) a step for detection of the hybridization reaction is subsequently carried out. The detection can be carried out by bringing the support on which the capture probes specific for the target gene are hybridized with the target gene-specific cDNAs into contact with a “detection” probe labeled with a label, and detecting the signal emitted by the label. When the target gene-specific cDNA has been labeled beforehand with a label, the signal emitted by the label is detected directly.

[0039] When the specific reagent is a hybridization probe, the expression of a target gene can also be determined in the following way:

[0040] 1) after having extracted, as biological material, the total RNA from a biological sample as presented above, a reverse transcription step is carried out as described above in order to obtain the cDNAs of the mRNAs of the biological material. The polymerization of the complementary RNA of the cDNA is subsequently carried out using a T7 polymerase enzyme which functions under the control of a promoter and which makes it possible to obtain, from a DNA template, the complementary RNA. The cRNAs of the cDNAs of the mRNAs specific for the target gene (reference is then made to target gene-specific cRNA) and the cRNAs of the cDNAs of the mRNAs not specific for the target gene are then obtained.

[0041] 2) all the cRNAs are brought into contact with a support on which are immobilized capture probes specific for the target gene whose expression it is desired to analyze, in order to carry out a hybridization reaction between the target gene-specific cRNAs and the capture probes; the cRNAs not specific for the target gene do not hybridize to the capture probes. When it is desired to simultaneously analyze the expression of several target genes, several different capture probes can be immobilized on the support, each one being specific for a target gene. The hybridization reaction can also be preceded by a step for labeling and/or cleaving the target gene-specific cRNAs as described above.

[0042] 3) a step for detecting the hybridization reaction is subsequently carried out. The detection can be carried out by bringing the support on which the capture probes specific for the target gene are hybridized with the target gene-specific cRNA into contact with a “detection” probe labeled with a label, and detecting the signal emitted by the label. When the target gene-specific cRNA has been labeled beforehand with a label, the signal emitted by the label is detected directly. The use of cRNA is particularly advantageous when a support of biochip type on which a large number of probes are hybridized is used. According to a specific embodiment of the invention, steps B and C are carried out at the same time. This preferred method can in particular be carried out by “real time NASBA”, which groups together, in a single step, the NASBA amplification technique and real-time detection which uses “molecular beacons”. The NASBA reaction takes place in the tube, producing the single-stranded RNA with which the specific “molecular beacons” can simultaneously hybridize to give a fluorescent signal. The formation of the new RNA molecules is measured in real time by continuous verification of the signal in a fluorescent reader. Unlike an RT-PCR amplification, NASBA amplification can take place with contaminating DNA being present in the sample. It is not therefore necessary to verify that the DNA has indeed been completely eliminated during the RNA extraction.

[0043] Surprisingly, the inventors have demonstrated that the analysis of the expression of target genes selected from 74 genes, as presented in table 1 below, is highly relevant for the early diagnosis of breast cancer.

TABLE 1
List of the 74 genes differentially expressed during the development of a
stage I/II breast cancer

| SEQ ID No. | Sequence description | Genbank No. |
|---|---|---|
| 1 | Centrosome-associated protein 350 [CAP350] | NM_014810 |
| 2 | Hypothetical protein MGC23401 | NM_144982 |
| 3 | Trophoblast-derived noncoding RNA [TncRNA] | AF001893 (Hs.523789) |
| 4 | Vacuolar protein sorting 35 (yeast) [PUM2] | NM_015317 |
| 5 | Ribosomal protein L36a-like [RPL36AL] | NM_001001 |
| 6 | Mitochondrial ribosomal protein L51 [MRPL51] | NM_016497 |
| 7 | KIAA0794 protein [KIAA0794] | XM_087353 |
| 8 | Transcribed locus | CA775887 (Hs. 388575) |
| 9 | Hypothetical protein MGC14817 [MGC14817] | NM_032338 |
| 10 | Hypothetical protein FLJ11046 | NM_018309 |
| 11 | Pleckstrin homology, Sec7 and coiled-coil domains 4 [PSCD4] | NM_013385 |
| 12 | Lactate dehydrogenase B [LDHB] | NM_002300 |
| 13 | NADH dehydrogenase (ubiquinone) alpha subcomplex 1 [NDUFA1] | NM_004541 |
| 14 | Muscleblind-like (Drosophila) [MBNL1] | NM_021038 |
| 15 | Ubiquitin specific protease 25 [USP25] | NM_013396 |
| 16 | TATA element modulatory factor 1 [TMF1] | NM_007114 |
| 17 | Ring finger protein 19 [RNF19] | NM_015435 |
| 18 | Signal peptidase complex subunit 3 homolog (S. cerevisiae) [SPCS3] | NM_021928 |
| 19 | Enhancer of polycomb homolog 1 (Drosophila) [EPC1] | NM_025209 |
| 20 | Zinc finger, matrin type 2 [ZMAT2] | NM_144723 |
| 21 | Image clone 3069209 | BF512254 |
| 22 | ORM1-like 3 (S. cerevisiae) [ORMDL3] | NM_139280 |
| 23 | CDNA FLJ11397 fis, clone HEMBA1000622 | AW962458 (Hs. 470871) |
| 24 | Tankyrase, TRF1-interacting ankyrin-related ADP-ribose polymerase [TNKS] | NM_003747 |
| 25 | Ribosomal protein S23 [RPS23] | NM_001025 |
| 26 | CDNA clone IMAGE: 5263531 | AK025902 (Hs.399763) |
| 27 | PABP1-dependent poly A-specific ribonuclease subunit [PAN3] | NM_175854 |
| 28 | Hypothetical protein FLJ21924 | NM_024774 |
| 29 | CDNA FLJ42313 fis, clone TRACH2019425 | AK124306 (Hs.386042) |
| 30 | Family with sequence similarity 49, member B [FAM49B] | NM_016623 |
| 31 | Dicer1, Dcr-1 homolog (Drosophila) [DICER1] | NM_030621 |
| 32 | Ribosomal protein L37 [RPL37] | NM_000997 |
| 33 | UDP-glucose ceramide glucosyltransferase [UGCG] | NM_003358 |
| 34 | Complement component (3b/4b) receptor 1 [CR1] | NM_000573 |
| 35 | KIAA1702 protein | AB051489 (Hs.485628) |
| 36 | Hypothetical protein FLJ10618 | NM_018155 |
| 37 | Hypothetical protein LOC146174 | NM_173501 |
| 38 | MRNA; cDNA DKFZp686D22106 (from clone DKFZp686D22106) | CR933609 (Hs. 445036) |
| 39 | Anterior pharynx defective 1 homolog A (C. elegans) [APH1A] | NM_016022 |
| 40 | U2-associated SR140 protein [SR140] | NM_031553 |
| 41 | Androgen-induced proliferation inhibitor [APRIN] | NM_015032 |
| 42 | Peptidylprolyl isomerase D (cyclophilin D) [PPID] | NM_005038 |
| 43 | Mitochondrial ribosomal protein S17 [MRPS17] | NM_015969 |
| 44 | Adaptor-related protein complex 1, sigma 2 subunit [AP1S2] | NM_003916 |
| 45 | Heat shock 90 kDa protein 1, alpha [HSPCA] | NM_005348 |
| 46 | GNAS complex locus [GNAS] | NM_000516 |
| 47 | 5-azacytidine induced 2 [AZI2] | NM_022461 |
| 48 | BCL2-like 1 [BCL2L1] | NM_001191 |
| 49 | Bobby sox homolog (Drosophila) [BBX] | NM_020235 |
| 50 | Calcium-transporting ATPase, type 2C, member 1 [ATP2C1] | NM_001001485 |
| 51 | Cathepsin Z [CTSZ] | NM_001336 |
| 52 | CDNA FLJ26120 fis, clone SYN00419 | AK129631 (Hs.433995) |
| 53 | COMM domain containing 6 [COMMD6] | NM_203495 |
| 54 | Cytochrome c oxidase subunit VIIb [COX7B] | NM_001866 |
| 55 | Cytoplasmic polyadenylation element binding protein 2 [CPEB2] | NM_182485 |
| 56 | Endoplasmic reticulum-golgi intermediate compartment 32 kDa protein | NM_020462 |
| | [KIAA1181] | |
| 57 | Ewing sarcoma breakpoint region 1 [EWSR1] | NM_005243 |
| 58 | Glyceraldehyde-3-phosphate dehydrogenase [GAPD] | NM_002046 |
| 59 | GRB2-associated binding protein 2 [GAB2] | NM_012296 |
| 60 | Killer cell lectin-like receptor subfamily C, member 1 or 2 [KLRC1/KLRC2] | NM_002259 |
| 61 | Killer cell lectin-like receptor subfamily F1 [KLRF1] | NM_016523 |
| 62 | Metastasis associated lung adenocarcinoma transcript 1 [MALAT1] | BX538238 (Hs.187199) |
| 63 | MRNA; cDNA DKFZp586O0724 | BU676985 (Hs.159115) |
| 64 | Nipped-B homolog (Drosophila) [NIPBL] | NM_015384 |
| 65 | Prader-Willi/Angelman region-1 [PAR1] | BE783065 (Hs.546847) |
| 66 | PRO1550 | AF086013 (Hs.371588) |
| 67 | Protein phosphatase 2, regulatory subunit B (B56), epsilon isoform | NM_006246 |
| | [PPP2R5E] | |
| 68 | RP42 homolog [RP42] | NM_020640 |
| 69 | Special AT-rich sequence binding protein 1 [SATB1] | NM_002971 |
| 70 | Tubulin beta 2 [TUBB2] | NM_001069 |
| 71 | Ubiquitin-fold modifier 1 [Ufm1] | NM_016617 |
| 72 | v-myb myeloblastosis viral oncogene homolog [MYBL1] | XM_034274 |
| 73 | WNK lysine deficient protein kinase 1 [WNK1] | NM_018979 |
| 74 | Zinc finger, MYND domain containing 11 [ZMYND11] | NM_006624 |

[0044] Among these genes, it is possible to distinguish genes for which the function is known but which have never been associated with breast cancer (SEQ ID Nos. 3 to 6; 11; 13 to 15; 17; 25; 31 to 34; 39; 42 to 46; 48; 50; 51; 54; 60; 62; 64; 67; 69; 70; 72 to 74) and also genes for which the function is unknown (SEQ ID Nos. 1; 2; 7 to 10; 16; 18 to 23; 26 to 30; 35 to 38; 40; 47; 49; 52; 53; 55 to 57; 61; 63; 65; 66; 68; 71).

[0045] All the isoforms of the genes according to the invention are relevant for the present invention. In this respect, it should in particular be noted that several variants exist for the target gene of SEQ ID No. 14; only the first variant is presented in the table above, but the variants having Genbank accession number: NM_{—}207292; NM_{—}207293; NM_{—}207294; NM_{—}207295; NM_{—}207296; NM_{—}207297 are just as relevant for the purpose of the present invention.

[0046] Similarly, for SEQ ID No. 17, only the first variant is presented in the table above, but the variant having Genbank accession number NM_{—}183419 is just as relevant for the purpose of the present invention.

[0047] Similarly, for SEQ ID No. 31, only the first variant is presented in the table above, but the variant having Genbank accession number NM_{—}177438 is just as relevant for the purpose of the present invention.

[0048] Similarly, for SEQ ID No. 34, only the first variant is presented in the table above, but the variant having Genbank accession number NM_{—}000651 is just as relevant for the purpose of the present invention.

[0049] Similarly, for SEQ ID No. 41, only the first variant is presented in the table above, but the variant having Genbank accession number NM_{—}015928 is just as relevant for the purpose of the present invention.

[0050] For the target gene of SEQ ID No. 46, only the first variant is presented in the table above, but the variants having Genbank accession number: NM_{—}016592; NM_{—}080425; NM_{—}080426 are just as relevant for the purpose of the present invention.

[0051] For the target gene of SEQ ID No. 47, only the first variant is presented in the table above, but the variant having Genbank accession number NM_{—}203326 is just as relevant for the purpose of the present invention.

[0052] For the target gene of SEQ ID No. 48, only the first variant is presented in the table above, but the variant having Genbank accession number NM_{—}138578 is just as relevant for the purpose of the present invention.

[0053] For the target gene of SEQ ID No. 50, only the first variant is presented in the table above, but the variants having Genbank accession number NM_{—}001001485; NM_{—}001001486; NM_{—}001001487; NM_{—}014382 are just as relevant for the purpose of the present invention.

[0054] For the target gene of SEQ ID No. 53, only the first variant is presented in the table above, but the variant having Genbank accession number NM_{—}203497 is just as relevant for the purpose of the present invention.

[0055] For the target gene of SEQ ID No. 55, only the first variant is presented in the table above, but the variant having Genbank accession number NM_{—}182646 is just as relevant for the purpose of the present invention.

[0056] For the target gene of SEQ ID No. 57, only the first variant is presented in the table above, but the variant having Genbank accession number Genbank NM_{—}013986 is just as relevant for the purpose of the present invention.

[0057] For the target gene of SEQ ID No. 59, only the first variant is presented in the table above, but the variant having Genbank accession number NM_{—}080491 is just as relevant for the purpose of the present invention.

[0058] For the target gene of SEQ ID No. 60, only the first variant is presented in the table above, but the variants having Genbank accession number: NM_{—}002259; NM_{—}002260; NM_{—}007328; NM_{—}213657; NM_{—}213658 are just as relevant for the purpose of the present invention.

[0059] For the target gene of SEQ ID No. 64, only the first variant is presented in the table above, but the variant having Genbank accession number NM_{—}133433 is just as relevant for the purpose of the present invention.

[0060] For the target gene of SEQ ID No. 74, only the first variant is presented in the table above, but the variant having Genbank accession number NM_{—}212479 is just as relevant for the purpose of the present invention.

[0061] Furthermore, the inventors have demonstrated that the analysis of target genes selected from the 95 genes presented in table 2 below are highly relevant for the diagnosis of advanced breast cancer.

TABLE 2
List of the 95 genes differentially expressed during the development of a
stage III/IV breast cancer

| SEQ ID No. | Sequence description | Genbank No. |
|---|---|---|
| 1 | Centrosome-associated protein 350 [CAP350] | NM_014810 |
| 2 | Hypothetical protein MGC23401 | NM_144982 |
| 3 | Trophoblast-derived noncoding RNA [TncRNA] | AF001893 (Hs.523789) |
| 4 | Vacuolar protein sorting 35 (yeast) [PUM2] | NM_015317 |
| 5 | Ribosomal protein L36a-like [RPL36AL] | NM_001001 |
| 6 | Mitochondrial ribosomal protein L51 [MRPL51] | NM_016497 |
| 13 | NADH dehydrogenase (ubiquinone) alpha subcomplex 1 [NDUFA1] | NM_004541 |
| 14 | Muscleblind-like (Drosophila) [MBNL1] | NM_021038 |
| 20 | Zinc finger, matrin type 2 [ZMAT2] | NM_144723 |
| 26 | CDNA clone IMAGE: 5263531, partial cds | AK025902 (Hs.399763) |
| 28 | Hypothetical protein FLJ21924 | NM_024774 |
| 36 | Hypothetical protein FLJ10618 | NM_018155 |
| 37 | Hypothetical protein LOC283666 | BC048264 (Hs.512943) |
| 39 | Anterior pharynx defective 1 homolog A (C. elegans) [APH1A] | NM_016022 |
| 40 | U2-associated SR140 protein [SR140] | XM_031553 |
| 41 | Androgen-induced proliferation inhibitor [APRIN] | NM_015032 |
| 46 | GNAS complex locus [GNAS] | NM_000516 |
| 48 | BCL2-like 1 [BCL2L1] | NM_001191 |
| 59 | GRB2-associated binding protein 2 [GAB2] | NM_012296 |
| 60 | Killer cell lectin-like receptor subfamily C, member 1 or 2 | NM_002259 |
| | [KLRC1/KLRC2] | |
| 61 | Killer cell lectin-like receptor subfamily F1 [KLRF1] | NM_016523 |
| 63 | mRNA; cDNA DKFZp586O0724 (from clone DKFZp586O0724) | BU676985 (Hs.159115) |
| 65 | Prader-Willi/Angelman region-1 [PAR1] | BE783065 (Hs.546847) |
| 67 | Protein phosphatase 2, regulatory subunit B (B56), epsilon isoform | NM_006246 |
| | [PPP2R5E] | |
| 69 | Special AT-rich sequence binding protein 1 [SATB1] | NM_002971 |
| 70 | Tubulin beta 2 [TUBB2] | NM_001069 |
| 71 | Ubiquitin-fold modifier 1 [Ufm1] | NM_016617 |
| 72 | v-myb myeloblastosis viral oncogene homolog [MYBL1] | XM_034274 |
| 73 | WNK lysine deficient protein kinase 1 [WNK1] | NM_018979 |
| 74 | Zinc finger, MYND domain containing 11 [ZMYND11] | NM_006624 |
| 75 | 30 kDa protein LOC55831 | NM_018447 |
| 76 | ADP-ribosylation factor guanine nucleotide-exchange factor 2 | NM_006420 |
| | [ARFGEF2] | |
| 77 | BTB (POZ) domain containing 5 [BTBD5] | NM_017658 |
| 78 | Cathepsin O [CTSO] | NM_001334 |
| 79 | Centrin, EF-hand protein 2 [CETN2] | NM_004344 |
| 80 | Chromosome 16 open reading frame 35 [C16orf35] | NM_012075 |
| 81 | Chromosome 2 open reading frame 33 [C2orf33] | NM_020194 |
| 82 | Cleavage and polyadenylation specific factor 6, 68 kDa [CPSF6] | NM_007007 |
| 83 | Cysteine-rich motor neuron 1 [CRIM1] | NM_016441 |
| 84 | Enoyl Coenzyme A hydratase domain containing 1 [ECHDC1] | NM_018479 |
| 85 | Erythrocyte membrane protein band 4.2 [EPB42] | NM_000119 |
| 86 | Formin binding protein 3 [FNBP3] | XM_371575 |
| 87 | Hepatitis B virus x associated protein [HBXAP] | NM_016578 |
| 88 | Hypothetical protein HSPC129 | NM_016396 |
| 89 | Hypothetical protein LOC144438 | AK002085 (Hs.92308) |
| 90 | Hypothetical protein MGC33214 | NM_153354 |
| 91 | Hypothetical protein MGC5306 | NM_024116 |
| 92 | Likely ortholog of mouse TORC2-specific protein AVO3 (S. cerevisiae) | NM_152756 |
| | [AVO3] | |
| 93 | Mannosidase, alpha, class 2A, member 1 [MAN2A1] | NM_002372 |
| 94 | Mdm4, p53 binding protein (mouse) [MDM4] | NM_002393 |
| 95 | Nucleobindin 1 [NUCB1] | NM_006184 |
| 96 | Oxysterol binding protein 2 [OSBP2] | NM_001003812 |
| 97 | Phosphoinositide-3-kinase, catalytic, alpha polypeptide [PIK3CA] | NM_006218 |
| 98 | Proteasome (prosome, macropain) inhibitor subunit 1 (PI31) [PSMF1] | NM_006814 |
| 99 | Protein tyrosine phosphatase type IVA, member 2 [PTP4A2] | NM_003479 |
| 100 | Rhesus blood group, D antigen [RHD] | NM_016124 |
| 101 | Ring finger protein 123 [RNF123] | NM_022064 |
| 102 | SH2 domain-containing molecule EAT2 [EAT2] | NM_053282 |
| 103 | Source of immunodominant MHC-associated peptides [SIMP] | NM_178862 |
| 104 | Split hand/foot malformation (ectrodactyly) type 1 [SHFM1] | NM_006304 |
| 105 | Thyroid hormone receptor associated protein 1 [THRAP1] | NM_005121 |
| 106 | Thyroid hormone receptor interactor 12 [TRIP12] | NM_004238 |
| 107 | Transcribed locus | AL037805 (Hs. 445247) |
| 108 | Transducin (beta)-like 1X-linked receptor 1 [TBL1XR1] | NM_024665 |
| 109 | Tubulin, beta 3 [TUBB3] | NM_006086 |
| 110 | Ubiquitination factor E4A (UFD2 homolog, yeast) [UBE4A] | NM_004788 |
| 111 | Zinc finger protein 148 (pHZ-52) [ZNF148] | NM_021964 |
| 112 | 3-alpha hydroxysteroid dehydrogenase, type II [AKR1C3] | NM_003739 |
| 113 | A kinase (PRKA) anchor protein 7 [AKAP7] | NM_004842 |
| 114 | Aminolevulinate, delta-, synthase 2 [ALAS2] | NM_000032 |
| 115 | Ankyrin 1, erythrocytic [ANK1] | NM_000037 |
| 116 | B double prime 1, subunit of RNA polymerase III transcription | NM_018429 |
| | initiation factor IIIB [BDP1] | |
| 117 | Carbonic anhydrase I [CA1] | NM_001738 |
| 118 | Chromosome 19 open reading frame 2 [C19orf2] | NM_003796 |
| 119 | DKFZP564F0522 protein | NM_015475 |
| 120 | Erythrocyte membrane protein band 4.9 (dematin) [EPB49] | NM_001978 |
| 121 | Family with sequence similarity 46, member C [FAM46C] | NM_017709 |
| 122 | guanosine monophosphate reductase [GMPR] | NM_006877 |
| 123 | Homo sapiens, clone IMAGE: 5267398, mRNA cDNA | BX538337 (Hs.40289) |
| | DKFZp686I23208 | |
| 124 | Image clone 3481554 | BF062399 |
| 125 | IMAGE clone 5259272 | BC032890 (Hs.184430) |
| 126 | Integrin, alpha 2b [ITGA2B] | NM_000419 |
| 127 | Interleukin 8 [IL8] | NM_000584 |
| 128 | Leucine rich repeat neuronal 3 [LRRN3] | NM_018334 |
| 129 | Leukocyte receptor cluster (LRC) member 10 [LENG10] | AF211977 |
| 130 | Major histocompatibility complex, class II, DQ alpha 1 [HLA-DQA1] | NM_002122 |
| 131 | Phosphatidylinositol glycan, class K [PIGK] | NM_005482 |
| 132 | Selenium binding protein 1 [SELENBP1] | NM_003944 |
| 133 | SM-11044 binding protein [SMBP] | NM_020123 |
| 134 | Solute carrier family 6 (neurotransmitter transporter, creatine), member | NM_005629 |
| | 8 [SLC6A8] | |
| 135 | TBC1 domain family, member 4 [TBC1D4] | NM_014832 |
| 136 | Tensin [TNS] | NM_022648 |
| 137 | TIA1 cytotoxic granule-associated RNA binding protein [TIA1] | NM_022037 |
| 138 | Transcribed locus | AA456099 (Hs.176376) |
| 139 | Tripartite motif-containing 58 [TRIM58] | NM_015431 |

[0062] Among these genes, it is possible to distinguish genes for which the function is known but which have never been associated with breast cancer (SEQ ID Nos. 3 to 6; 13; 14; 39; 46; 48; 60; 67; 69; 70; 72 to 74; 76; 78; 79; 82; 83; 85; 87; 92 to 94; 97; 99 to 101; 103; 105; 110; 111; 113 to 116; 118; 120; 122; 126; 130 to 132; 134; 136; 137) and also genes for which the function is unknown (SEQ ID Nos. 1; 2; 20; 26; 28; 36; 37; 40; 61; 63; 65; 71; 75; 77; 80; 81; 84; 86; 88 to 91; 95; 96; 102; 104; 106 to 109; 119; 121; 123 to 125; 128; 129; 133; 135; 138; 139).

[0063] All the isoforms of the genes according to the invention are relevant for the present invention. In this respect, it should in particular be noted that several variants exist for the target gene of SEQ ID No. 14; only the first variant is presented in the table above, but the variants having Genbank accession number: NM_{—}207292; NM_{—}207293; NM_{—}207294; NM_{—}207295; NM_{—}207296; NM_{—}207297 are just as relevant for the purpose of the present invention.

[0064] Similarly, for the target gene of SEQ ID No. 41, only the first variant is presented in the table above, but the variant having Genbank accession number NM_{—}015928 is just as relevant for the purpose of the present invention.

[0065] Similarly, for the target gene of SEQ ID No. 74, only the first variant is presented in the table above, but the variant having Genbank accession number NM_{—}212479 is just as relevant for the purpose of the present invention.

[0066] Similarly, for the target gene of SEQ ID No. 96, only the first variant is presented in the table above, but the variant having Genbank accession number NM_{—}030758 is just as relevant for the purpose of the present invention.

[0067] For the target gene of SEQ ID No. 98, only the first variant is presented in the table above, but the variants having Genbank accession number: NM_{—}178578; NM_{—}178579 are just as relevant for the purpose of the present invention.

[0068] For the target gene of SEQ ID No. 99, only the first variant is presented in the table above, but the variants having Genbank accession number: NM_{—}080391; NM_{—}080392 are just as relevant for the purpose of the present invention.

[0069] Similarly, for the target gene of SEQ ID No. 100, only the first variant is presented in the table above, but the variant having Genbank accession number NM_{—}016225 is just as relevant for the purpose of the present invention.

[0070] For the target gene of SEQ ID No. 112, only the first variant is presented in the table above, but the variants having Genbank accession number: NM_{—}016377; NM_{—}138633 are just as relevant for the purpose of the present invention.

[0071] For the target gene of SEQ ID No. 115, only the first variant is presented in the table above, but the variants having Genbank accession number: NM_{—}020475; NM_{—}020476; NM_{—}020477; NM_{—}020478; NM_{—}020479; NM_{—}020480; NM_{—}020481 are just as relevant for the purpose of the present invention.

[0072] Similarly, for the target gene of SEQ ID No. 137, only the first variant is presented in the table above, but the variant having Genbank accession number NM_{—}022173 is just as relevant for the present invention.

[0073] In this respect, the invention relates to a method for the in vitro diagnosis of breast cancer in a patient who may be suffering from a breast cancer, characterized in that it comprises the following steps:
[0074] a. biological material is extracted from a biological sample taken from the patient,
[0075] b. the biological material is brought into contact with at least one specific reagent chosen from the specific reagents for the target genes with a nucleic sequence having any one of SEQ ID Nos. 1 to 74,
[0076] c. the expression of said target genes is determined.

[0077] The analysis of the expression of a target gene chosen from any one of SEQ ID Nos. 1 to 74 then makes it possible to have a tool for the diagnosis of breast cancer, and is very suitable for an early diagnosis. It is, for example, possible to analyze the expression of a target gene in a patient for whom the diagnosis is not known, and to compare with known average expression values for the target gene of normal patients and known average expression values for the target gene of patients suffering from an early-stage breast cancer.

[0078] According to a specific embodiment of the invention, in step b), the biological material is brought into contact with at least 5, at least 10, at least 15, at least 20, at least 25, at least 30, at least 35, at least 40, at least 45, at least 50, at least 55, at least 60, at least 65, at least 70 or at least 74 specific reagents chosen from the specific reagents for the target genes with a nucleic sequence having any one of SEQ ID NOs. 1 to 74, and, in step c, the expression of at least 5, at least 10, at least 15, at least 20, at least 25, at least 30, at least 35, at least 40, at least 45, at least 50, at least 55, at least 60, at least 65, at least 70 or at least 74 of said genes is determined.

[0079] According to a specific embodiment of the invention, the invention relates to an in vitro method for the diagnosis, preferably early diagnosis, of breast cancer in a patient who may be suffering from a breast cancer, characterized in that it comprises the following steps:

a. biological material is extracted from a biological sample taken from the patient,
b. the biological material is brought into contact with at least 46 specific reagents chosen from the specific reagents for the target genes with a nucleic sequence having any one of SEQ ID Nos. 1 to 46,
c. the expression of said target genes is determined.

[0080] According to another preferred embodiment of the invention, in step b), the biological material is brought into contact with at least 23 or with 23 specific reagents chosen from the specific reagents for the target genes with a nucleic sequence having any one of SEQ ID Nos. 1 to 23, and, in step c, the expression of at least 23 or 23 of said target genes is determined.

[0081] According to a particularly preferred embodiment of the invention, the invention relates to an in vitro method for the diagnosis, preferably early diagnosis, of breast cancer in a patient who may be suffering from a breast cancer, characterized in that it comprises the following steps:

a. biological material is extracted from a biological sample taken from the patient,
b. the biological material is brought into contact with at least 23 specific reagents chosen from the specific reagents for the target genes with a nucleic sequence having any one of SEQ ID Nos. 1 to 23,
c. the expression of said target genes is determined.

[0082] According to another preferred embodiment of the invention, in step b), the biological material is brought into contact with at least 8 or with 8 specific reagents chosen from the specific reagents for the target genes with a nucleic sequence having any one of SEQ ID Nos. 1 to 8, and, in step c, the expression of at least 8 or 8 of said genes is determined. According to a preferred embodiment of the invention, the invention relates to an in vitro method for the diagnosis, preferably early diagnosis, of breast cancer in a patient who may be suffering from a breast cancer, characterized in that it comprises the following steps:

a. biological material is extracted from a biological sample taken from the patient,
b. the biological material is brought into contact with at least 8 specific reagents chosen from the specific reagents for the target genes with a nucleic sequence having any one of SEQ ID Nos. 1 to 8,
c. the expression of said target genes is determined.

[0083] The use of a restricted panel of genes is particularly suitable for obtaining a prognostic tool. In fact, the analysis of the expression of about ten genes does not require the custom-made fabrication of DNA chips, and can be carried out directly by PCR or NASBA techniques, or low-density chip techniques, which provides a considerable economic asset and a simplified implementation.

[0084] The invention also relates to a method for the in vitro diagnosis of breast cancer in a patient who may be suffering from a breast cancer, characterized in that it comprises the following steps:
[0085] a. biological material is extracted from a biological sample taken from the patient,
[0086] b. the biological material is brought into contact with at least one specific reagent chosen from the specific reagents for the target genes with a nucleic sequence having any one of SEQ ID Nos. 1 to 6; No. 1 to 6; 13; 14; 20; 26; 28; 36 to 41; 46; 48; 59 to 61; 63; 65; 67; 69 to 139,
[0087] c. the expression of said target genes is determined.

[0088] The analysis of the expression of a target gene chosen from any one of SEQ ID No. 1 to SEQ ID Nos. 1 to 6; 13; 14; 20; 26; 28; 36 to 41; 46; 48; 59 to 61; 63; 65; 67; 69 to 139 then makes it possible to provide a tool for the diagnosis of breast cancer, which is very suitable for the diagnosis of a late-stage cancer. It is, for example, possible to analyze the expression of a target gene in a patient for whom the diagnosis is not known, and to compare with known average expression values for the target gene of normal patients and known average expression values for the target gene of patients suffering from a late-stage breast cancer. This tool also makes it possible, for example, to monitor a treatment prescribed for a patient suffering from an advanced breast cancer.

[0089] According to a specific embodiment of the invention, in step b), the biological material is brought into contact with at least 5, at least 10, at least 15, at least 20, at least 25, at least 30, at least 35, at least 40, at least 45, at least 50, at least 55, at least 60, at least 65, at least 70, at least 75, at least 80, at least 85, at least 90, at least 95 or at least 97 specific reagents chosen from the specific reagents for the target genes with a nucleic sequence having any one of SEQ ID Nos. 1 to 6; 13; 14; 20; 26; 28; 36 to 41; 46; 48; 59 to 61; 63; 65; 67; 69 to 139, and, in step c, the expression of at least 5, at least 10, at least 15, at least 20, at least 25, at least 30, at least 35, at least 40, at least 45, at least 50, at least 55, at least 60, at least 65, at least 70, at least 75, at least 80, at least 85, at least 90, at least 95 or at least 97 of said target genes is determined.

[0090] According to a preferred embodiment of the invention, the invention relates to a method for the in vitro late diagnosis of breast cancer in a patient who may be suffering from a breast cancer, characterized in that it comprises the following steps:

a. biological material is extracted from a biological sample taken from the patient,
b. the biological material is brought into contact with at least 54 or 54 specific reagents chosen from the specific reagents for the target genes with a nucleic sequence having any one of SEQ ID Nos. 1 to 6; 13; 14; 20; 26; 28; 38 to 41; 69; 74 to 110,
c. the expression of said target genes is determined.

[0091] According to another preferred embodiment of the invention, in step b), the biological material is brought into contact with at least 29 or with 29 specific reagents chosen from the specific reagents for the target genes with a nucleic sequence having any one of SEQ ID Nos. 1; 2; 4 to 6; 13; 14; 20; 26; 38; 39; 41; 69; 75; 79 to 81; 87; 89; 93; 95 to 96; 101; 103 to 106; 108; 110, and, in step c, the expression of at least 29 or 29 of said target genes is determined.

[0092] According to a specific embodiment of the invention, the invention relates to a method for the in vitro early diagnosis of breast cancer in a patient who may be suffering from a breast cancer, characterized in that it comprises the following steps:

a. biological material is extracted from a biological sample taken from the patient,
b. the biological material is brought into contact with at least 29 or 29 specific reagents chosen from the specific reagents for the target genes with a nucleic sequence having any one of SEQ ID Nos. SEQ ID Nos 1; 2; 4 to 6; 13; 14; 20; 26; 38; 39; 41; 69; 75; 79 to 81; 87; 89; 93; 95 to 96; 101; 103 to 106; 108; 110,
c. the expression of said target genes is determined.

[0093] According to another preferred embodiment of the invention, in step b), the biological material is brought into contact with at least 10 or with 10 specific reagents chosen from the specific reagents for the target genes with a nucleic sequence having any one of SEQ ID Nos. 1; 2; 4; 6; 13; 14; 26; 69; 81; 105, and, in step c, the expression of at least 10 or 10 of said target genes is determined.

[0094] According to a preferred embodiment of the invention, the invention relates to an in vitro method for the diagnosis, preferably late diagnosis, of breast cancer in a patient who may be suffering from a breast cancer, characterized in that it comprises the following steps:

a. biological material is extracted from a biological sample taken from the patient,
b. the biological material is brought into contact with at least 10 or 10 specific reagents chosen from the specific reagents for the target genes with a nucleic sequence having any one of SEQ ID Nos. 1; 2; 4; 6; 13; 14; 26; 69; 81; 105,
c. the expression of said target genes is determined.

[0095] The use of a restricted panel of genes is particularly suitable for obtaining a prognostic tool. In fact, the analysis of the expression of about ten genes does not require the custom-made fabrication of DNA chips, and can be carried out directly by PCR or NASBA techniques, or low-density chip techniques, which provides a considerable economic asset and a simplified implementation.

[0096] Irrespective of the variant of the method according to the invention, the biological sample taken from the patient is preferably a blood sample. This makes it possible to obtain a method of diagnosis that is easy to implement and relatively painless for the patient. Irrespective of the variant of the method according to the invention, the biological material extracted in step a) preferably comprises nucleic acids, which allows an easy and rapid analysis of the expression of the target gene(s) in step c). In this case, said specific reagents of step b) are preferably hybridization probes. These hybridization probes are preferably immobilized on a support, which is preferably a biochip. This biochip then allows the simultaneous analysis of all the target genes according to the invention.

[0097] The invention also relates to a support, as defined above, comprising at least 8 specific hybridization probes for target genes with a nucleic sequence having any one of SEQ ID Nos. 1 to 8. The invention also relates to a support, as defined above, consisting of 8 specific hybridization probes for target genes with a nucleic sequence having any one of SEQ ID Nos. 1 to 8.

[0098] The invention also relates to a support, as defined above, comprising at least 23 specific hybridization probes for target genes with a nucleic sequence having any one of SEQ ID Nos. 1 to 23. The invention also relates to a support, as defined above, consisting of 23 specific hybridization probes for target genes with a nucleic sequence having any one of SEQ ID Nos. 1 to 23.

[0099] The invention also relates to a support, as defined above, comprising at least 46 specific hybridization probes for target genes with a nucleic sequence having any one of SEQ ID Nos. 1 to 46. This support preferably also comprises at least 28 specific hybridization probes for target genes with a nucleic sequence having any one of SEQ ID Nos. 47 to 74. The invention also relates to a support, as defined above, consisting of 46 specific hybridization probes for target genes with a nucleic sequence having any one of SEQ ID Nos. 1 to 46. This support preferably also consists of 28 specific hybridization probes for target genes with a nucleic sequence having any one of SEQ ID Nos. 47 to 74.

[0100] The invention also relates to the use of a support as defined above, for the early diagnosis of a breast cancer. The invention also relates to a kit for the early diagnosis of a breast cancer, comprising a support as defined above.

[0101] The invention also relates to a support comprising at least or consisting of 10 specific hybridization probes for target genes with a nucleic sequence having any one of SEQ ID Nos. 1; 2; 4; 6; 13; 14; 26; 69; 81; 105.

[0102] The invention also relates to a support comprising at least or consisting of 29 specific hybridization probes for target genes with a nucleic sequence having any one of SEQ ID Nos. 1; 2; 4 to 6; 13; 14; 20; 26; 38; 39; 41; 69; 75; 79 to 81; 87; 89; 93; 95 to 96; 101; 103 to 106; 108; 110.

[0103] The invention also relates to a support comprising at least or consisting of 54 specific hybridization probes for target genes with a nucleic sequence having any one of SEQ ID Nos. 1 to 6; 13; 14; 20; 26; 28; 38 to 41; 69; 74 to 111. This support preferably also comprises specific hybridization probes for target genes with a nucleic sequence having any one of SEQ ID Nos. 36; 37; 46; 48; 59 to 61; 63; 65; 67; 70 to 72; 73; 112 to 139. The invention also relates to the use of a support as defined above, for the late diagnosis of a breast cancer.

[0104] Finally, the invention relates to a kit for the early diagnosis of a breast cancer, comprising a support as defined above.

[0105] The attached figures are given by way of explanatory examples and are in no way limiting in nature. They will make it possible to understand the invention more clearly.

[0106] FIGS. 1 to 4 represent the analysis of hierarchical clustering of blood samples obtained from 24 patients suffering from an early-stage cancer (C I/II, also called D) and 12 control patients (normal donors), using the expression of 74 (FIG. 1), 46 (FIG. 2), 23 (FIG. 3) or 8 (FIG. 4) genes identified by algorithmic analysis. The hierarchical clustering function of the Spotfire software organizes the C I/II and control patients in columns, and the genes in rows so as to obtain in adjacent position the patients or the genes with comparable expression profiles. Pearson's correlation coefficient was used as a similarity index for the genes and the patients. The results correspond to the affymetrix fluorescence level normalized with the “bioconductor” tool. In order to take into account the constitutive differences in expression between the genes, the levels of expression of each gene were normalized by calculating a reduced centered variable. The white represents the low levels of expression, the gray the intermediate levels and the black the high levels. The height of the branches of the dendrogram indicates the index of similarity between the expression profiles.

[0107] FIGS. 5 to 8 represent the analysis of hierarchical clustering of blood samples obtained from 10 patients suffering from an advanced-stage cancer (C II/IV, referenced D) and 12 control patients (normal donors) using the expression of 97 (FIG. 5), 54 (FIG. 6), 29 (FIG. 7), or 10 (FIG. 8) genes identified by algorithmic analysis. The hierarchical clustering function of the Spotfire software organizes the C III/IV and control patients in columns, and the genes in rows so as to obtain in adjacent position the patients or the genes with comparable expression profiles. Pearson's correlation coefficient was used as a similarity index for the genes and the patients. The results correspond to the affymetrix fluorescence level normalized with the “bioconductor” tool. In order to take into account the constitutive differences in expression between the genes, the levels of expression of each gene were normalized by calculating a reduced centered variable. The white represents the low levels of expression, the gray the intermediate levels and the black the high levels. The height of the branches of the dendrogram indicates the index of similarity between the expression profiles.

[0108] The following examples are given by way of illustration and are in no way limiting in nature. They will make it possible to understand the invention more clearly.

### EXAMPLE 1

### Demonstration of an Expression Profile for Breast Cancer Diagnosis Using a Blood Sample

[0109] Biological sample characteristics: The example presented hereinafter was carried out using 46 blood samples (5 ml of whole blood, taken in two PaxGene tubes). These samples included 12 blood samples originating from normal control patients (S, obtained from the French Blood Bank) and 24 samples from patients suffering from a phase I/II breast cancer (Ci/ii).

[0110] Extraction of the biological material (total RNA) from the biological sample: The blood samples were collected directly in PAXGene™ Blood RNA tubes (PreAnalytix, Frankin Lakes, USA). After the step in which the blood sample was taken, and in order to obtain complete lysis of the cells, the tubes were left at ambient temperature for 4 h and then stored at −20° C. until extraction of the biological material. More specifically, in this protocol, the total RNA was extracted using the PAXGene Blood RNA® kits (PreAnalytix), according to the manufacturer's recommendations. Briefly, the tubes were centrifuged (10 min, 3000 g) in order to obtain a nucleic acid pellet. This pellet was washed and taken up in a buffer containing proteinase K, required for digestion of the proteins (10 min at 55° C.). A further centrifugation (5 min, 19 000 g) was carried out in order to remove the cell debris, and ethanol was added in order to optimize the conditions for binding of the nucleic acids. The total RNA was specifically bound to PAXgene RNA spin columns and, before the elution of said RNA, the contaminating DNA was digested using the RNAse free DNAse set (Qiagen Ltd, Crawley, UK). The quality of the total RNA was analyzed using the AGILENT 2100 bioanalyzer (Agilent Technologies, Waldbronn, Germany). The total RNA comprises the transfer RNAs, the messenger RNAs (mRNAs) and the ribosomal RNAs.

[0111] cDNA synthesis, cRNA production and cRNA labeling, and quantification: In order to analyze the expression of the target genes according to the invention, the complementary DNAs (cDNAs) of the mRNAs contained in the total RNA as purified above were obtained from 10 μg of total RNA using 400 units of the SuperScriptII reverse transcription enzyme (Invitrogen) and 100 μmol of poly-T primer containing the T7 promoter (T7-oligo(dT)₂₄-primer, Proligo, Paris, France).

[0112] The cDNAs thus obtained were subsequently extracted with phenol/chloroform and precipitated as described previously with ammonium acetate and ethanol, and redissolved in 24 μl of DEPC water. A volume of 20 μl of this purified cDNA solution was subsequently subjected to in vitro transcription using a T7 RNA polymerase which specifically recognizes the T7 polymerase promoter as mentioned above. This transcription makes it possible to obtain the cRNA of the cDNA. This transcription was carried out using an IVT labeling kit (Affymetrix, Santa Clara, Calif.), which makes it possible not only to obtain the cRNA, but also the incorporation of biotinylated pseudouridine bases during the synthesis of the cRNA. The purified cRNAs were subsequently quantified by spectrophotometry, and the cRNA solution was adjusted to a concentration of 1 μg/μl of cRNA. The step consisting of cleavage of these cRNAs was subsequently carried out at 94° C. for 35 min, using a fragmentation buffer (40 mM of tris acetate, pH 8.1, 100 mM of potassium acetate, 30 mM of magnesium acetate) in order to bring about the hydrolysis of the cRNAs and to obtain fragments of 35 to 200 bp. The success of such a fragmentation was verified by means of a 1.5% agarose gel electrophoresis.

[0113] Demonstration of an Expression Profile for the Genes which Makes it Possible to Distinguish Between the Control Patients (S) and the Patients Suffering from a Stage I/II Cancer

[0114] The expression of approximately 30 000 genes was analyzed and compared between S and C I/II patients. For this, 10 μg of fragmented cRNAs derived from each sample were added to a hybridization buffer (Affymetrix) and 200 μl of this solution were brought into contact for 16 h at 45° C. on an expression chip (Human Genome U133Plus2 GeneChip® (Affymetrix)), which comprises 54 000 groups of probes representing approximately 30 000 genes, according to the Affymetrix protocol.

[0115] In order to record the best hybridization and washing performance levels, RNAs described as “control” RNAs that were biotinylated (bioB, bioC, bioD and cre) and oligonucleotides (oligo B2) were also included in the hybridization buffer. After the hybridization step, the biotinylated cRNAs hybridized on the chip were visualized using a solution of streptavidin-phycoerythrin and the signal was amplified using an anti-streptavidin antibody. The hybridization was carried out in a “GeneChip Hybridisation oven” (Affymetrix), and the Euk GE-WS2 protocol of the Affymetrix protocol was followed. The washing and visualization steps were carried out on a “Fluidics Station 450” (Affymetrix). Each U133—Plus_{—}2 chip was subsequently analyzed on an Agilent G3000 GeneArray Scanner at a resolution of 1.5 microns in order to pinpoint the areas hybridized on the chip. This scanner makes it possible to detect the signal emitted by the fluorescent molecules after excitation with an argon laser using the epifluorescence microscope technique. A signal proportional to the amount of cRNAs bound is thus obtained for each position. The signal was subsequently analyzed using the GeneChip Operating Software (GCOS1.2, Affymetrix).

[0116] In order to prevent the variations obtained by using various chips, a normalization approach was carried out using the “bioconductor” tool, which makes it possible to harmonize the mean distribution of the raw data for each chip. The results obtained on a chip can then be compared with the results obtained on another chip. The GCOS 1.2 software also made it possible to include a statistical algorithm for deciding whether or not a gene was expressed. Each gene represented on the U133_Plus_{—}2 chip was covered by 11 to 16 pairs of probes of 25 nucleotides. The term “pair of probes” is intended to mean a first probe which hybridizes perfectly (reference is then made to PM or perfect match probes) with one of the cRNAs derived from a target gene, and a second probe, identical to the first probe with the exception of a mismatch (reference is then made to MM or mismatched probe) at the center of the probe. Each MM probe was used to estimate the background noise corresponding to a hybridization between two nucleotide fragments of noncomplementary sequence (Affymetrix technical note “Statistical Algorithms Reference Guide”; Lipshutz, et al., (1999) Nat. Genet. 1 Suppl., 20-24). The remaining 46 samples showed an average of 42.1% of expressed genes.

[0117] On the basis of the 54 000 groups of probes, representing approximately 30 000 genes, of the chip, the inventors selected the relevant genes which were correlated with the development of a breast cancer.

[0118] The genes which have an expression level that is too low on the majority of the chips and also the genes which do not show any substantial variation between the various chips were excluded (Li et al., 2001, Bioinformatics, 17: 1131-1142). The search for a panel of genes for distinguishing the groups of patients EFS [French Blood Bank] and CI/II was carried out by a Data Mining technique (http://ligarto.org/rdiaz/Papers/jomadas.bioinfo.randomForest.pdf).

[0119] This analysis made it possible to reveal a first panel of genes, comprising 46 relevant genes according to the invention (SEQ ID Nos. 1 to 46). A complementary analysis (SAM, significance analysis of microarrays) also made it possible to reveal additional genes which also proved to be very relevant (SEQ ID Nos. 47 to 74).

[0120] The increase or decrease in expression of each of these genes, observed in the S patients compared with the C I/II patients, is shown in table 3.

TABLE 3
List of the 74 genes differentially expressed during the development of a breast
cancer

| SEQ | | | C I/II vs. |
|---|---|---|---|
| ID | | | normal |
| No. | Sequence description | Genbank No. | patients |
| 1 | Centrosome-associated protein 350 [CAP350] | NM_014810 | 0.6 |
| 2 | Hypothetical protein MGC23401 | NM_144982 | 0.6 |
| 3 | Trophoblast-derived noncoding RNA [TncRNA] | AF001893 (Hs.523789) | 0.4 |
| 4 | Vacuolar protein sorting 35 (yeast) [PUM2] | NM_015317 | 0.6 |
| 5 | Ribosomal protein L36a-like [RPL36AL] | NM_001001 | 2.8 |
| 6 | Mitochondrial ribosomal protein L51 [MRPL51] | NM_016497 | 2.1 |
| 7 | KIAA0794 protein [KIAA0794] | XM_087353 | 1.7 |
| 8 | Transcribed locus | CA775887 (Hs. 388575) | 0.6 |
| 9 | Hypothetical protein MGC14817 [MGC14817] | NM_032338 | 2.1 |
| 10 | Hypothetical protein FLJ11046 | NM_018309 | 0.7 |
| 11 | Pleckstrin homology, Sec7 and coiled-coil domains 4 [PSCD4] | NM_013385 | 1.5 |
| 12 | Lactate dehydrogenase B [LDHB] | NM_002300 | 2.3 |
| 13 | NADH dehydrogenase (ubiquinone) alpha subcomplex 1 [NDUFA1] | NM_004541 | 1.7 |
| 14 | Muscleblind-like (Drosophila) [MBNL1] | NM_021038 | 0.5 |
| 15 | Ubiquitin specific protease 25 [USP25] | NM_013396 | 0.6 |
| 16 | TATA element modulatory factor 1 [TMF1] | NM_007114 | 0.7 |
| 17 | Ring finger protein 19 [RNF19] | NM_015435 | 0.6 |
| 18 | Signal peptidase complex subunit 3 homolog (S. cerevisiae) [SPCS3] | NM_021928 | 0.6 |
| 19 | Enhancer of polycomb homolog 1 (Drosophila) [EPC1] | NM_025209 | 0.6 |
| 20 | Zinc finger, matrin type 2 [ZMAT2] | NM_144723 | 1.7 |
| 21 | Image clone 3069209 | BF512254 | 0.6 |
| 22 | ORM1-like 3 (S. cerevisiae) [ORMDL3] | NM_139280 | 1.5 |
| 23 | CDNA FLJ11397 fis, clone HEMBA1000622 | AW962458 (Hs. 470871) | 0.6 |
| 24 | Tankyrase, TRF1-interacting ankyrin-related ADP-ribose polymerase | NM_003747 | 0.6 |
| | [TNKS] | | |
| 25 | Ribosomal protein S23 [RPS23] | NM_001025 | 1.8 |
| 26 | CDNA clone IMAGE: 5263531 | AK025902 (Hs.399763) | 0.7 |
| 27 | PABP1-dependent poly A-specific ribonuclease subunit [PAN3] | NM_175854 | 0.6 |
| 28 | Hypothetical protein FLJ21924 | NM_024774 | 0.6 |
| 29 | CDNA FLJ42313 fis, clone TRACH2019425 | AK124306 (Hs.386042) | 2.1 |
| 30 | Family with sequence similarity 49, member B [FAM49B] | NM_016623 | 1.5 |
| 31 | Dicer1, Dcr-1 homolog (Drosophila) [DICER1] | NM_030621 | 0.7 |
| 32 | Ribosomal protein L37 [RPL37] | NM_000997 | 1.6 |
| 33 | UDP-glucose ceramide glucosyltransferase [UGCG] | NM_003358 | 0.7 |
| 34 | Complement component (3b/4b) receptor 1 [CR1] | NM_000573 | 1.6 |
| 35 | KIAA1702 protein | AB051489 (Hs.485628) | 0.7 |
| 36 | Hypothetical protein FLJ10618 | NM_018155 | 0.5 |
| 37 | Hypothetical protein LOC146174 | NM_173501 | 0.7 |
| 38 | MRNA; cDNA DKFZp686D22106 (from clone DKFZp686D22106) | CR933609 (Hs. 445036) | 0.7 |
| 39 | Anterior pharynx defective 1 homolog A (C. elegans) [APH1A] | NM_016022 | 0.7 |
| 40 | U2-associated SR140 protein [SR140] | XM_031553 | 0.5 |
| 41 | Androgen-induced proliferation inhibitor [APRIN] | NM_015032; NM_015928 | 0.6 |
| 42 | Peptidylprolyl isomerase D (cyclophilin D) [PPID] | NM_005038 | 1.4 |
| 43 | Mitochondrial ribosomal protein S17 [MRPS17] | NM_015969 | 1.8 |
| 44 | Adaptor-related protein complex 1, sigma 2 subunit [AP1S2] | NM_003916 | 0.6 |
| 45 | Heat shock 90 kDa protein 1, alpha [HSPCA] | NM_005348 | 1.8 |
| 46 | GNAS complex locus [GNAS] | NM_000516; NM_016592; | 0.5 |
| | | NM_080425; NM_080426 | |
| 47 | 5-azacytidine induced 2 [AZI2] | NM_022461 | 0.6 |
| 48 | BCL2-like 1 [BCL2L1] | NM_001191 | 1.9 |
| 49 | Bobby sox homolog (Drosophila) [BBX] | NM_020235 | 0.6 |
| 50 | Calcium-transporting ATPase, type 2C, member 1 [ATP2C1] | NM_001001485 | 0.6 |
| 51 | Cathepsin Z [CTSZ] | NM_001336 | 0.6 |
| 52 | CDNA FLJ26120 fis, clone SYN00419 | AK129631 (Hs.433995) | 2.2 |
| 53 | COMM domain containing 6 [COMMD6] | NM_203495 | 0.6 |
| 54 | Cytochrome c oxidase subunit VIIb [COX7B] | NM_001866 | 0.5 |
| 55 | Cytoplasmic polyadenylation element binding protein 2 [CPEB2] | NM_182485 | 0.6 |
| 56 | Endoplasmic reticulum-golgi intermediate compartment 32 kDa | NM_020462 | 0.5 |
| | protein [KIAA1181] | | |
| 57 | Ewing sarcoma breakpoint region 1 [EWSR1] | NM_005243 | 1.9 |
| 58 | Glyceraldehyde-3-phosphate dehydrogenase [GAPD] | NM_002046 | 2.3 |
| 59 | GRB2-associated binding protein 2 [GAB2] | NM_012296 | 2.2 |
| 60 | Killer cell lectin-like receptor subfamily C, member 1 or 2 | NM_002259 | 0.4 |
| | [KLRC1/KLRC2] | | |
| 61 | Killer cell lectin-like receptor subfamily F1 [KLRF1] | NM_016523 | 0.6 |
| 62 | Metastasis associated lung adenocarcinoma transcript 1 [MALAT1] | BX538238 (Hs.187199) | 1.9 |
| 63 | MRNA; cDNA DKFZp586O0724 | BU676985 (Hs.159115) | 0.5 |
| 64 | Nipped-B homolog (Drosophila) [NIPBL] | NM_015384 | 0.5 |
| 65 | Prader-Willi/Angelman region-1 [PAR1] | BE783065 (Hs.546847) | 0.5 |
| 66 | PRO1550 | AF086013 (Hs.371588) | 0.6 |
| 67 | Protein phosphatase 2, regulatory subunit B (B56), epsilon isoform | NM_006246 | 0.6 |
| | [PPP2R5E] | | |
| 68 | RP42 homolog [RP42] | NM_020640 | 0.5 |
| 69 | Special AT-rich sequence binding protein 1 [SATB1] | NM_002971 | 0.5 |
| 70 | Tubulin beta 2 [TUBB2] | NM_001069 | 0.5 |
| 71 | Ubiquitin-fold modifier 1 [Ufm1] | NM_016617 | 0.5 |
| 72 | v-myb myeloblastosis viral oncogene homolog [MYBL1] | XM_034274 | 0.6 |
| 73 | WNK lysine deficient protein kinase 1 [WNK1] | NM_018979 | 2.0 |
| 74 | Zinc finger, MYND domain containing 11 [ZMYND11] | NM_006624 | 0.6 |

[0121] The inventors also studied the simultaneous expression of 74 genes of nucleotide sequence chosen from SEQ ID Nos. 1 to 74 in order to obtain an expression profile. The results are given in FIG. 1. 100% of the patients were correctly classified.

[0122] The inventors also studied the simultaneous expression of 46 genes of nucleotide sequence chosen from SEQ ID Nos. 1 to 46 in order to obtain an expression profile. The results are given in FIG. 2. 100% of the patients were correctly classified.

[0123] The inventors also studied the simultaneous expression of 23 genes of nucleotide sequence chosen from SEQ ID Nos. 1 to 23 in order to obtain an expression profile. The results are given in FIG. 3. 100% of the patients were correctly classified.

[0124] The inventors also studied the simultaneous expression of 8 genes of nucleotide sequence chosen from SEQ ID Nos. 1 to 8 in order to obtain an expression profile. The results are given in FIG. 4. 100% of the patients were correctly classified.

### EXAMPLE 2

### Demonstration of an Expression Profile for Breast Cancer Diagnosis Using a Blood Sample

[0125] Biological sample characteristics: The example presented hereinafter was carried out using 46 blood samples (5 ml of whole blood, taken in two PaxGene tubes). These samples included 12 blood samples originating from normal control patients (S, obtained from the French Blood Bank) and 24 samples from patients suffering from a phase III/IV breast cancer (CIII/IV), i.e. an advanced stage of breast cancer.

[0126] Extraction of the biological material (total RNA) from the biological sample: this step was carried out in a manner comparable to example 1.

[0127] cDNA synthesis, cRNA production and cRNA labeling, and quantification: this step was carried out in a manner comparable to example 1.

[0128] Demonstration of an Expression Profile for the Genes which Makes it Possible to Distinguish Between the Control Patients (S) and the Patients Suffering from a Stage III/IV Cancer

[0129] The expression of approximately 30 000 genes was analyzed and compared between S and C III/IV patients. For this, 10 μg of fragmented cRNAs derived from each sample were added to a hybridization buffer (Affymetrix) and 200 μl of this solution were brought into contact for 16 h at 45° C. on an expression chip (Human Genome U133Plus2 GeneChip® (Affymetrix)), which comprises 54 000 groups of probes representing approximately 30 000 genes, according to the Affymetrix protocol.

[0130] In order to record the best hybridization and washing performance levels, RNAs described as “control” RNAs that were biotinylated (bioB, bioC, bioD and cre) and oligonucleotides (oligo B2) were also included in the hybridization buffer. After the hybridization step, the biotinylated cRNAs hybridized on the chip were visualized using a solution of streptavidin-phycoerythrin and the signal was amplified using an anti-streptavidin antibody. The hybridization was carried out in a “GeneChip Hybridisation oven” (Affymetrix), and the Euk GE-WS2 protocol of the Affymetrix protocol was followed. The washing and visualization steps were carried out on a “Fluidics Station 450” (Affymetrix). Each U133—Plus_{—}2 chip was subsequently analyzed on an Agilent G3000 GeneArray Scanner at a resolution of 1.5 microns in order to pinpoint the areas hybridized on the chip. This scanner makes it possible to detect the signal emitted by the fluorescent molecules after excitation with an argon laser using the epifluorescence microscope technique. A signal proportional to the amount of cRNAs bound is thus obtained for each position. The signal was subsequently analyzed using the GeneChip Operating Software (GCOS 1.2, Affymetrix).

[0131] In order to prevent the variations obtained by using various chips, a normalization approach was carried out using the “bioconductor” tool, which makes it possible to harmonize the mean distribution of the raw data for each chip. The results obtained on a chip can then be compared with the results obtained on another chip. The GCOS 1.2 software also made it possible to include a statistical algorithm for deciding whether or not a gene was expressed. Each gene represented on the U133_Plus_{—}2 chip was covered by 11 to 16 pairs of probes of 25 nucleotides. The term “pair of probes” is intended to mean a first probe which hybridizes perfectly (reference is then made to PM or perfect match probes) with one of the cRNAs derived from a target gene, and a second probe, identical to the first probe with the exception of a mismatch (reference is then made to MM or mismatched probe) at the center of the probe. Each MM probe was used to estimate the background noise corresponding to a hybridization between two nucleotide fragments of noncomplementary sequence (Affymetrix technical note “Statistical Algorithms Reference Guide”; Lipshutz, et al., (1999) Nat. Genet. 1 Suppl., 20-24). The remaining 46 samples showed an average of 42.1% of expressed genes.

[0132] On the basis of the 54 000 groups of probes, representing approximately 30 000 genes, of the chip, the inventors selected the relevant genes which were correlated with the development of a breast cancer.

[0133] The genes which have an expression level that is too low on the majority of the chips and also the genes which do not show any substantial variation between the various chips were excluded (Li et al., 2001, Bioinformatics, 17: 1131-1142). The search for a panel of genes for distinguishing the groups of patients EFS [French Blood Bank] and CI/II was carried out by a Data Mining technique (http://ligarto.org/rdiaz/Papers/jornadas.bioinfo.randomForest.pdf).

[0134] This analysis made it possible to reveal a first panel of genes, comprising 54 relevant genes according to the invention (SEQ ID Nos. 1 to 6; 13; 14; 20; 26; 28; 38 to 41; 69; 74 to 111). A complementary analysis (SAM, significance analysis of microarrays) also made it possible to reveal additional genes which also proved to be very relevant (SEQ ID Nos. 36; 37; 46; 48; 59 to 61; 63; 65; 67; 70 to 72; 73; 112 to 139).

[0135] The increase or decrease in the expression of each of these genes, observed in the S patients compared with the C I/II patients, is given in table 3.

TABLE 4
List of the 96 genes differentially expressed during the development of a breast
cancer

| | | | C III/IV vs. normal |
|---|---|---|---|
| SEQ ID No. | Sequence description | Genbank No. | patients |
| 1 | Centrosome-associated protein 350 [CAP350] | NM_014810 | 0.5 |
| 2 | Hypothetical protein MGC23401 | NM_144982 | 0.6 |
| 3 | Trophoblast-derived noncoding RNA [TncRNA] | AF001893 (Hs.523789) | 0.4 |
| 4 | Vacuolar protein sorting 35 (yeast) [PUM2] | NM_015317 | 0.5 |
| 5 | Ribosomal protein L36a-like [RPL36AL] | NM_001001 | 2.5 |
| 6 | Mitochondrial ribosomal protein L51 [MRPL51] | NM_016497 | 1.5 |
| 13 | NADH dehydrogenase (ubiquinone) alpha | NM_004541 | 1.7 |
| | subcomplex 1 [NDUFA1] | | |
| 14 | Muscleblind-like (Drosophila) [MBNL1] | NM_021038 | 0.5 |
| 20 | Zinc finger, matrin type 2 [ZMAT2] | NM_144723 | 1.9 |
| 26 | CDNA clone IMAGE: 5263531, partial cds | AK025902 (Hs.399763) | 0.7 |
| 28 | Hypothetical protein FLJ21924 | NM_024774 | 0.6 |
| 36 | Hypothetical protein FLJ10618 | NM_018155 | 0.5 |
| 37 | Hypothetical protein LOC283666 | BC048264 (Hs.512943) | 0.5 |
| 39 | Anterior pharynx defective 1 homolog A (C. elegans) | NM_016022 | 0.6 |
| | [APH1A] | | |
| 40 | U2-associated SR140 protein [SR140] | XM_031553 | 0.5 |
| 41 | Androgen-induced proliferation inhibitor [APRIN] | NM_015032 | 0.6 |
| 46 | GNAS complex locus [GNAS] | NM_000516 | 0.5 |
| 48 | BCL2-like 1 [BCL2L1] | NM_001191 | 2.5 |
| 59 | GRB2-associated binding protein 2 [GAB2] | NM_012296 | 2.1 |
| 60 | Killer cell lectin-like receptor subfamily C, member | NM_002259 | 0.3 |
| | 1 or 2 [KLRC1/KLRC2] | | |
| 61 | Killer cell lectin-like receptor subfamily F1 | NM_016523 | 0.3 |
| | [KLRF1] | | |
| 63 | mRNA; cDNA DKFZp586O0724 (from clone | BU676985 (Hs.159115) | 0.4 |
| | DKFZp586O0724) | | |
| 65 | Prader-Willi/Angelman region-1 [PAR1] | BE783065 (Hs.546847) | 0.4 |
| 67 | Protein phosphatase 2, regulatory subunit B (B56), | NM_006246 | 0.5 |
| | epsilon isoform [PPP2R5E] | | |
| 69 | Special AT-rich sequence binding protein 1 | NM_002971 | 0.5 |
| | [SATB1] | | |
| 70 | Tubulin beta 2 [TUBB2] | NM_001069 | 3.1 |
| 71 | Ubiquitin-fold modifier 1 [Ufm1] | NM_016617 | 0.5 |
| 72 | v-myb myeloblastosis viral oncogene homolog | XM_034274 | 0.5 |
| | [MYBL1] | | |
| 73 | WNK lysine deficient protein kinase 1 [WNK1] | NM_018979 | 2.2 |
| 74 | Zinc finger, MYND domain containing 11 | NM_006624 | 0.6 |
| | [ZMYND11] | | |
| 75 | 30 kDa protein LOC55831 | NM_018447 | 1.7 |
| 76 | ADP-ribosylation factor guanine nucleotide- | NM_006420 | 0.6 |
| | exchange factor 2 [ARFGEF2] | | |
| 77 | BTB (POZ) domain containing 5 [BTBD5] | NM_017658 | 0.7 |
| 78 | Cathepsin O [CTSO] | NM_001334 | 0.7 |
| 79 | Centrin, EF-hand protein 2 [CETN2] | NM_004344 | 2.0 |
| 80 | Chromosome 16 open reading frame 35 [C16orf35] | NM_012075 | 2.0 |
| 81 | Chromosome 2 open reading frame 33 [C2orf33] | NM_020194 | 0.6 |
| 82 | Cleavage and polyadenylation specific factor 6, | NM_007007 | 0.7 |
| | 68 kDa [CPSF6] | | |
| 83 | Cysteine-rich motor neuron 1 [CRIM1] | NM_016441 | 0.6 |
| 84 | Enoyl Coenzyme A hydratase domain containing 1 | NM_018479 | 0.6 |
| | [ECHDC1] | | |
| 85 | Erythrocyte membrane protein band 4.2 [EPB42] | NM_000119 | 2.4 |
| 86 | Formin binding protein 3 [FNBP3] | XM_371575 | 0.6 |
| 87 | Hepatitis B virus x associated protein [HBXAP] | NM_016578 | 0.6 |
| 88 | Hypothetical protein HSPC129 | NM_016396 | 0.5 |
| 89 | Hypothetical protein LOC144438 | AK002085 (Hs.92308) | 0.6 |
| 90 | Hypothetical protein MGC33214 | NM_153354 | 0.7 |
| 91 | Hypothetical protein MGC5306 | NM_024116 | 0.7 |
| 92 | Likely ortholog of mouse TORC2-specific protein | NM_152756 | 0.6 |
| | AVO3 (S. cerevisiae) [AVO3] | | |
| 93 | Mannosidase, alpha, class 2A, member 1 | NM_002372 | 0.7 |
| | [MAN2A1] | | |
| 94 | Mdm4, p53 binding protein (mouse) [MDM4] | NM_002393 | 0.7 |
| 95 | Nucleobindin 1 [NUCB1] | NM_006184 | 1.6 |
| 96 | Oxysterol binding protein 2 [OSBP2] | NM_001003812 | 2.0 |
| 97 | Phosphoinositide-3-kinase, catalytic, alpha | NM_006218 | 0.6 |
| | polypeptide [PIK3CA] | | |
| 98 | Proteasome (prosome, macropain) inhibitor subunit | NM_006814 | 1.5 |
| | 1 (PI31) [PSMF1] | | |
| 99 | Protein tyrosine phosphatase type IVA, member 2 | NM_003479 | 0.7 |
| | [PTP4A2] | | |
| 100 | Rhesus blood group, D antigen [RHD] | NM_016124 | 2.4 |
| 101 | Ring finger protein 123 [RNF123] | NM_022064 | 1.8 |
| 102 | SH2 domain-containing molecule EAT2 [EAT2] | NM_053282 | 0.4 |
| 103 | Source of immunodominant MHC-associated | NM_178862 | 0.5 |
| | peptides [SIMP] | | |
| 104 | Split hand/foot malformation (ectrodactyly) type 1 | NM_006304 | 1.5 |
| | [SHFM1] | | |
| 105 | Thyroid hormone receptor associated protein 1 | NM_005121 | 0.6 |
| | [THRAP1] | | |
| 106 | Thyroid hormone receptor interactor 12 [TRIP12] | NM_004238 | 0.7 |
| 107 | Transcribed locus | AL037805 (Hs. 445247) | 0.6 |
| 108 | Transducin (beta)-like 1X-linked receptor 1 | NM_024665 | 0.5 |
| | [TBL1XR1] | | |
| 109 | Tubulin, beta 3 [TUBB3] | NM_006086 | 1.6 |
| 110 | Ubiquitination factor E4A (UFD2 homolog, yeast) | NM_004788 | 0.7 |
| | [UBE4A] | | |
| 111 | Zinc finger protein 148 (pHZ-52) [ZNF148] | NM_021964 | 0.7 |
| 112 | 3-alpha hydroxysteroid dehydrogenase, type II | NM_003739 | 0.4 |
| | [AKR1C3] | | |
| 113 | A kinase (PRKA) anchor protein 7 [AKAP7] | NM_004842 | 0.4 |
| 114 | Aminolevulinate, delta-, synthase 2 [ALAS2] | NM_000032 | 2.8 |
| 115 | Ankyrin 1, erythrocytic [ANK1] | NM_000037 | 2.4 |
| 116 | B double prime 1, subunit of RNA polymerase III | NM_018429 | 0.5 |
| | transcription initiation factor IIIB [BDP1] | | |
| 117 | Carbonic anhydrase I [CA1] | NM_001738 | 5.6 |
| 118 | Chromosome 19 open reading frame 2 [C19orf2] | NM_003796 | 0.5 |
| 119 | DKFZP564F0522 protein | NM_015475 | 0.4 |
| 120 | Erythrocyte membrane protein band 4.9 (dematin) | NM_001978 | 2.1 |
| | [EPB49] | | |
| 121 | Family with sequence similarity 46, member C | NM_017709 | 2.8 |
| | [FAM46C] | | |
| 122 | guanosine monophosphate reductase [GMPR] | NM_006877 | 2.4 |
| 123 | Homo sapiens, clone IMAGE: 5267398, mRNA | BX538337 (Hs.40289) | 0.5 |
| | cDNA DKFZp686I23208 | | |
| 124 | Image clone 3481554 | BF062399 | 0.5 |
| 125 | IMAGE clone 5259272 | BC032890 (Hs.184430) | 0.5 |
| 126 | Integrin, alpha 2b [ITGA2B] | NM_000419 | 2.7 |
| 127 | Interleukin 8 [IL8] | NM_000584 | 0.4 |
| 128 | Leucine rich repeat neuronal 3 [LRRN3] | NM_018334 | 0.4 |
| 129 | Leukocyte receptor cluster (LRC) member 10 | AF211977 | 0.5 |
| | [LENG10] | | |
| 130 | Major histocompatibility complex, class II, DQ | NM_002122 | 2.2 |
| | alpha 1 [HLA-DQA1] | | |
| 131 | Phosphatidylinositol glycan, class K [PIGK] | NM_005482 | 0.5 |
| 132 | Selenium binding protein 1 [SELENBP1] | NM_003944 | 2.6 |
| 133 | SM-11044 binding protein [SMBP] | NM_020123 | 0.5 |
| 134 | Solute carrier family 6 (neurotransmitter | NM_005629 | 2.3 |
| | transporter, creatine), member 8 [SLC6A8] | | |
| 135 | TBC1 domain family, member 4 [TBC1D4] | NM_014832 | 0.5 |
| 136 | Tensin [TNS] | NM_022648 | 2.8 |
| 137 | TIA1 cytotoxic granule-associated RNA binding | NM_022037 | 0.5 |
| | protein [TIA1] | | |
| 138 | Transcribed locus | AA456099 (Hs.176376) | 0.4 |
| 139 | Tripartite motif-containing 58 [TRIM58] | NM_015431 | 2.3 |

[0136] The inventors also studied the simultaneous expression of the 96 genes presented above in order to obtain an expression profile. The results are given in FIG. 5. 100% of the patients were correctly classified.

[0137] The inventors also studied the simultaneous expression of 54 genes of nucleotide sequence chosen from SEQ ID Nos. 1 to 6; 13; 14; 20; 26; 28; 38 to 41; 69; 74 to 111, in order to obtain an expression profile. The results are given in FIG. 6. 100% of the patients were correctly classified.

[0138] The inventors also studied the simultaneous expression of 29 genes of nucleotide sequence chosen from SEQ ID Nos. 1; 2; 4 to 6; 13; 14; 20; 26; 38; 39; 41; 69; 75; 79 to 81; 87; 89; 93; 95 to 96; 101; 103 to 106; 108; 110, in order to obtain an expression profile. The results are given in FIG. 7. 100% of the patients were correctly classified. The inventors also studied the simultaneous expression of 10 genes of nucleotide sequence chosen from SEQ ID Nos. 1; 2; 4; 6; 13; 14; 26; 69; 81; 105, in order to obtain an expression profile. The results are given in FIG. 8. 100% of the patients were correctly classified.

[0139] This confirms that the analysis of the expression of all or part of the genes of SEQ ID Nos. 1 to 139 is a good tool for distinguishing between patients suffering from a cancer or not suffering from a cancer, and, if the patient is suffering from a cancer, for determining the stage of progression of his or her cancer.

1. A method for the in vitro diagnosis of breast cancer in a patient who may be suffering from a breast cancer, comprising:
a) extracting biological material from a biological sample taken from the patient,
b) bringing the biological material into contact with at least 8 specific reagents chosen from the specific reagents for the target genes with a nucleic sequence having any one of SEQ ID NOS.: 1 to 8 and,
c) determining expression of said target genes is determined.

2. A method for the in vitro diagnosis of breast cancer in a patient who may be suffering from a breast cancer, comprising:
a) extracting biological material from a biological sample taken from the patient,
b) bringing the biological material into contact with at least 10 specific reagents chosen from the specific reagents for the target genes with a nucleic sequence having any one of SEQ ID NOS. 1; 2; 4; 6; 13; 14; 26; 69; 81; 105 and,
c) determining expression of said target genes.

3. The method as claimed in claim 1, wherein the biological sample taken from the patient is a blood sample.

4. The method as claimed in claim 1, wherein the biological material extracted in step a) comprises nucleic acids.

5. The method as claimed in claim 4, wherein said specific reagents of step b) are hybridization probes.

6. The method as claimed in claim 5, wherein said hybridization probes are immobilized on a support.

7. The method as claimed in claim 6, wherein the support is a biochip.

8. A support comprising at least 8 specific hybridization probes for target genes with a nucleic sequence having any one of SEQ ID NOS.: 1 to 8.

9. A method for the early diagnosis of a breast cancer, comprising applying a patient biological material to the support of claim 8.

10. A kit for the early diagnosis of a breast cancer, comprising a support as claimed in claim 8.

11. A support comprising at least 10 specific hybridization probes for target genes with a nucleic sequence having any one of SEQ ID NOS.: 1; 2; 4; 6; 13; 14; 26; 69; 81; 105.

12. A method for the late diagnosis of a breast cancer, comprising applying a patient biological material to the support of claim 10.

13. A kit for the early diagnosis of a breast cancer, comprising the support as claimed in claim 12.

14. The method as claimed in claim 2, wherein the biological sample taken from the patient is a blood sample.

15. The method as claimed in claim 2, wherein the biological material extracted in step a) comprises nucleic acids.

16. The method as claimed in claim 15, wherein said specific reagents of step b) are hybridization probes.

17. The method as claimed in claim 16, wherein said hybridization probes are immobilized on a support.

18. The method as claimed in claim 17, wherein the support is a biochip.

The application's sequence listing, which the Patent Office published only in electronic form, follows.

SEQUENCE LISTING (139 sequences)

SEQ ID NO: 1 - DNA, 11740 bp, Homo sapiens
cccggagccggtgcgaggagggcacccggtgcgtccccggagcggggaggccaggccgggcaaccctggggccggtcggggcggcgtcactgcaccctccgccaggctccgcgggatgcaccgtggtagccgagggcggaggcgacactctcaggtaaattggcaggatgaggagcagcaaatcaaaagaggtgcctttaccaaatccaaggaactctcaaagcaaggatactgttcaagcagatataaccacatcgtgggatgcactttctcaaaccaaggctgctctgagacacattgaaaataaattagaagtagcccctacaagtacagctgtgtgtgattctgtcatggataccaagaagtcttctacaagtgctactcgaaaaataagtagaaaagatggtagatacctggatgattcttgggttaatgctccaatctccaaatccactaaatcacgaaaagagaaatctcgtagtcctctcagggccaccaccctggagggtaatgtgaagaaaaataatcgtgtggaatttcgtgaacctttggtttcttatagggaaatccatggtgcaccttccaatttcagttccagccatctggaatcaaagcacgtatactgtgtagatgttaatgaagaaaagactgagagcggtaactggatgataggcagtcgagaagaacggaatatacggagctgtgattttgagagctcccaatcatctgtcatcaatgatacagttgttaggtttttaaatgatcgaccagcaattgatgcattgcaaaattctgaatgtttgattaggatgggagcttctatgagaactgaggaagaaatgcctaacagaacaaaaggaagtgagaataatttgaagctttctgtgaataacatggcccatgatactgatccaaaagcgttacgactaactgactcttctccatcctctactagtacttctaattcccaaagattagatattctaaagcggcgacaacatgatgtcaaactggaaaaacttaaggaacggattagaaaacagtgggaacactcagaagaaacaaatggccggggccagaagctgggtcatattgaccatccagtaatggttgttaatgttgataactcagtaacagcaaaagtcagaaaagtggcaacagcaccacctgctccagcatataaaggtttcaacccttcagagaccaagattcgaacacctgatgggaaagtgtggcaggaggctgagtttcaaaacatgagtagagaactgtatcgagatttagcacttcactttgcagatgatatttctataaaggagaaacctgctgaaaaaagtaaagagaagaaagtagtcaagccagtacgaaaagtccaaaaagtagcacagttatcaagtacagaatgcagaacaggtagtagtcatcttataagtacatcttcttggcgagatggacaaaaattagtaaagaagattctgggacctgctcccagaatggagccaaaagagcaaagaacagcatcaagtgacagaggtggaagaagaagaactgctaaatctgggggtcacattggaagagcagaatctgatcccaggttggacgttttacatagacatcttcaaagaaactcagaacgttcgagaagtaaatctcggtctgaaaataatataaagaaactagcttcatctcttccagataataagcaggaggaaaatactgccttaaataaggactttttacctattgaaattcgtggcattcttgatgacctacagctggattctacagctcacactgcaaagcaagatactgtagagttacagaaccagaagtcatcagcaccagtacatgctcctaggagtcacagcccagtaaaaagaaaacctgacaaaataacagctaatgaagatccccctgttatttccaaaaggcgccactatgacacagatgaggtacgacagtacattgttaggcagcaggaggaaaggaagagaaagcaaaatgaagagaagaaggctcaaaaggaggctacagaacagaaaaacaaacgattacaagagctctaccggaagcagaaggaagcctttactaaagtaaaaaatgtccctccttctgagccatcagcaactaggcgactacaggaaacttactccaaattgctactagaaaagaccttgcttgaagagccatctcatcaacatgttacgcaggaaacacaggccaaaccagggtatcagccatctggagaatctgacaaagaaaacaaagtacaggaacgtcccccaagtgcatcttccagtagtgacatgtctctctcagaacctccacagcctcttgcaagaaaagacttgatggaatctacatggatgcagcctgaaagattgagcccacaagttcaccattctcaaccacagccttttgctggaacagctggaagtttactctcccatctcttgagtttagagcatgtaggaattttgcataaggattttgaatctattttaccaaccaggaagaatcataatatggcttcaaggccattaacttttacacctcaaccatatgtgacctcaccagctgcttatacagatgccttgttaaaacctagtgccagccaatataagagtaaactggatcgtattgaagccttgaaagcaacagctgcttctttgtccagcagaattgaaagtgaagccaagaaattagctggggccagcattaactatgggtcagcatggaacactgagtatgatgtgcagcaggcacctcaagaagatggaccttggaccaaggctgtaactccacctgtgaaagatgataatgaagatgttttctctgccagaattcagaagatgctgggaagctgtgtatctcatgcaacttttgatgatgatcttcctggtgtaggcaatcttagtgaatttaaaaagcttcctgagatgataagaccacagagtgccatatcaagctttagagtgagatcccctggtcccaaaccacaagggctactggcacagttatgtaaaaggcagactgactcttctagctctgatatgcaagcctgttctcaagacaaagccaaaatatctcttggttccagcatagattcagtcagtgaagggcctcttcttagtgaggggagtctctctgaagaagagggagaccaggatggacagccccttttgaaagtagcagaaattttaaaagaaaaggaattttgtcctggagaaagaaatagttatgaacccatcaaagagtttcagaaagaagctgaaaaattcttgccactttttgggcacataggtggtacacaaagcaaaggaccatgggaagaattggcaaagggaagtccacatagcgtcattaatatttttacaaaatcctatcagttatatggaaaagggtttgaagacaagttggacagaggaacatcaacatcacggcctttgaatgccaccgcaactcctctaagtggtgtttcatatgaagatgattttgtctcctctccagggactgggacttcgacagaaaaaaaatcaactcttgaacctcatagcactttaagccctcaggaggaccattctaacagaaagtctgcctatgatccttcctctgtggatgttacctcccagcattcatcaggagcccagtctgctgcatcgtctcgttcatctacttcttctaaaggaaagaaaggaaaaaaggaaaagacagaatggttggattcattcactggaaatgttcagaactcacttcttgatgaggaaaaagcagaacgtggctcccatcaaggaaagaaatctgggaccagcagcaaactttctgttaaagattttgagcagactcttgatacagatagcactttggaggatctttctggacattctgtgagtgtctcatcagataagggaagatctcagaaaactccaacttctcccctgtcaccaagttcccagaaatcattgcagtttgacgttgcaggaacttcttcagaaagatctaagtcgtcagtaatgcctccaactataacaggatttaagcctaatgcacctctcactgatctgaacccggcagccagcagaacaacgacagagaacatggctccaataccaggttctaagcgcttttctcctgctggcctccatcatcgtatggcagcagaactcagttatctgaacgccattgaggagtcggtgcgccaactgtcagatgtagaaagagttagaggcatttcacttgctcagcaggagagtgtgtctctagctcagataataaaggcacaacagcaacgccatgaaagagacttggccctcttgaaactaaaggctgaacaagaggctctggagagtcagagacaattagaagaaacccgaaacaaagcagctcaggtccatgcagaatcattacagcaggtggttcaatcacaacgggaagtaactgaagtcctgcaggaagcaacgtgtaaaatagcagctcagcagtcagaaactgctcgcctcaccacagacgcagcacgtcaaatctgtgagatggcagagttgactagaactcatatctcagatgctgtcgtggcttcaggagctccccttgcaatactgtatgaccaccaacggcagcaccttccagactttgtgaaacagctgaggaccagaactgaaacagataggaaaagtccatctgtttcactctctcagagtaaagaagggacccttgactcaaagcatcagaagtattctgcttcatatgatagttattctgagtcttcaggatacaagaatcatgatagaagaagtagcagtggtagcagccgccaagaaagtccttcagttccatcttgtaaggaaaatgagaagaaacttaatggtgaaaagatagagagttccattgatgaacaggttcagactgctgcagatgattctctacgaagtgatagtgttccatctcttcctgatgaaaaagactcaacgtctattgcaacagaatattctctgaaatttgatgaatccatgacagaagatgaaatagaagaacaatcatttcgatcattactaccttcagagagtcaccgcagatttaacatggaaaagagaagaggtcatcatgatgactctgatgaagaagcttctccagaaaaaactacactgtctactgccaaggaactgaacatgccattctcaggaggacaagatagcttttctaaatttactatggagatggttcgacagtatatgaaagaggaagaaatgagggcagctcaccagtcttcactcctgcgtctccgtgaaaaggccttgaaggagaagactaaggctgaattggcctggttagagcatcaaaaaaaacatctacgagacaaaggagaggatgataaaatgcccccgctccggaagaaacagcgtggtttgcttttaaggttgcagcaagaaaaggcagaaataaaacgtcttcaagaagccaataaggcagctcggaaggaaagacagctgattcttaaacagcaggaggagatagaaaagatccgacagaccaccataaaactacaggagaaattgaagtctgcaggggagagtaaattggactctcatagtgatgatgatacaaaggataataaggcaaccagtcctggtccaactgacttggagacccgcagtccttctcccatttcaatctccagcagtgaaactagcagcattatgcagaaactgaagaaaatgagaagccgcatggatgaaaagtttctgacaaagcgggagcaaaaattaatgcaacggcgacaacatgcagaggagctcctagagtggaagcgacgtttagatgcagaagaagcagaaattcgtcaaatggaaaaacaagctttggctgcctgggacaaagaattaataaaacccaaaactcctaagaaagaactggaggaccagagaacagaacagaaagaaatagcaagtgaagaggaatctccagtacctctgtactctcatctaaacagtgaaagctccattccagaagaattaggcagccctgctgttgaatatgtaccatccgagtctataggacaggagcagccagggagtccagatcacagtatacttactgaagaaatgatttgttcacaggaactagaatcttctacctctcctagtaaacattcacttcccaaaagctgcacatctgtgtcaaagcaggagtctagcaaaggaagtcataggactggaggacaatgtcacctgcctatcaagtcccatcagcactgttatagttggtcagatgagtcattatctatgacacagtcagaaactacatctgaccagagtgatattgaaggtaggatcagagctctgaaggatgagttgcggaaaagaaaatcagttgtgaaccagctgaagaaggaacagaaaaaaaggcaaaaggaaagactgaaagcccaagaagccagtctgatcaagcagttagagtcatatgatgaatttattaagaaaactgaagccgagcttagccaagatttggaaacatcaccaacagccaagcctcagattaaaacgctctcctcagcttctgaaaaacccaagatcaaacccctcacaccactacacagatctgaaacggcaaagaattggaaatcactaacagagtcagaacgttccagaggatccctggagcctattgctgaacatgttgatgcttcactgtctggttctgagagatcagtatcagaaaggtctttatctgcatatgcaaagagagtaaatgaatgggacagtcgaacagaagattttcagaccccatctccagttctcagatcatcaaggaaaatcagagaagaatctggagattctctagaaaatgtacctgcattacatcttctcaaagaattaaatgccactagtagaattcttgatatgtcagatggcaaggttggagaatctagtaaaaaatcagaaataaaagaaatagagtatacaaaattgaagaagagtaagattgaagatgccttttctaaagaaggtaaatctgatgtcttactgaaattagtcctagaacagggagattcatctgaaattctttcaaagaaagatcttcctttagattctgaaaatgttcagaaagacctagttggattagctattgaaaatctccataaaagtgaggaaatgttgaaagagagacagtcagatcaagatatgaatcatagtccaaacatccaatcaggaaaagacattcacgaacaaaagaacacaaaggaaaaagatttgtcttggtcagaacatctttttgctcctaaagagataccatactctgaagattttgaagtgtcttctttcaagaaagaaatttcagctgaattgtacaaagatgattttgaggtgtcatctttgctgtcactcaggaaagactctcagtcttgcagagataagccacagccaatgaggagctctacaagtggagccactagctttggtagtaatgaggaaatcagtgagtgcctaagtgagaaaagcctttctatccatagcaatgttcattctgacaggctgttggaactcaagtcccctactgagctgatgaaaagtaaggagcgcagtgatgtggagcatgaacagcaagttactgaatccccttccttggcttcagttcctactgcagacgagttatttgatttccacattggtgatagggtgttgattggaaatgttcagccaggaattcttcgattcaaaggtgagactagttttgctaaaggattttgggccggagtggagttagataaacctgaaggaaataacaatggaacatatgatggtattgcatattttgagtgcaaagaaaagcatggtatttttgctcctcctcaaaaaatatctcacattccagaaaactttgatgactatgtagacattaatgaagatgaagactgttactcagatgaacgatatcagtgctataatcaagagcaaaatgatacagagggtccaaaagacagagaaaaggatgtcagtgaatatttttatgagaaatccctacctagtgtgaatgatatagaagcctcagttaatagaagtagaagccttaaaatagaaacagacaatgtacaggacatttctggggtacttgaagcccatgttcaccagcagtcttcagtggattcacagatttcttcaaaggaaaacaaagacctcatttctgatgccacagaaaaggtttccatcgctgcagaagatgacactttagacaataccttttccgaagaattggagaagcaacagcagtttacagaagaggaagacaacctatatgctgaagcttcagaaaagctttgtacaccacttctggatcttttaacaagagaaaaaaaccaactggaagcccagctgaagtcatcactaaatgaggaaaaaaagtcaaaacaacaactggaaaaaatcagcttactgacagacagtttactaaaagtctttgtaaaggacacagtcaatcaactacaacaaatcaaaaaaaccagggatgagaaaatccagcttagcaatcaggagcttcttggtgatgaccaaaagaaagtaacaccccaagacctatcccaaaatgttgaggaacagtcgccaagtatttcaggttgcttcttaagttctgaattggaagatgaaaaagaagagatttcctctccagatatgtgtcccagaccggagagcccagtatttggtgccagtgggcaggaagaacttgctaagagacttgctgaacttgaactcagccgggagttcctgagcgcgttaggagatgatcaagactggtttgatgaagactttggtttgagctcttctcacaagatccaaaaaaataaggcagaagaaaccattgtacctctaatggcagaacctaaaagagtaacccaacaaccatgtgaaacattattggcagtcccccatactgcagaagaagtagagattcttgtacataatgcagcagaagaactttggaaatggaaagaattaggccacgatcttcatagcatcagtattcctacaaaactgcttggctgtgccagtaaaggtctagatatagaaagcactagtaaaagggtctacaaacaggcggtttttgatttaacaaaagagatttttgaggaaatatttgctgaggatcccaacttaaatcaacctgtctggatgaagccatgtagaatcaactctagttatttccgacgagtgaaaaatccaaataaccttgatgaaatcaagagcttcatagcaagtgaagtactcaagttgttcagtcttaaaaaggagccaaaccacaaaacagattggcagaaaatgatgaaatttggaagaaagaaaagagaccgagtggatcatatcctggttcaggagctccatgaggaggaggcacagtgggtgaactatgatgaggatgagttgtgtgtgaaaatgcagctagccgacgggatctttgagaccctgatcaaagatactattgatgttctgaatcagatcagtgaaaagcaggggagaatgctactagtgtgacatcttgcaaataaatcgaacgctgagtgctaatgtgagtcctgggcctttctgcctcctgatgtacacccatcgccatcatagcaagagtgcttctggaccttgtacttattcttaaagactaccagtatggagttcataggacaatgtggtacacctggtattacagcctttgcctttcgagactatccactggattaatgggttattttcagtgggcagggttgcacagtgtaatcctacaccttttgctaacacccctactaggtcccagagggccagaaacacctgacttacctctgagtttagactagggtatcacttctttgagtctgaagtcaagtgagagaggtatagataaatgcatcacatcacttttgaaatgtaattctggtctataccatggaagtcataaatggacattatagtctctaaacagtattaaacccttaaccacttctaaaataggcaagctcaataatgtctgccaacttcacattctggagtttatttcatttctttttgaagaccattttcttccattattgtagttgagcagcaccaagtggactgtcaggctaacaggaataagtggtagccttgctttctgagcaccatctaaagaattttaaacctctgcattatgtttagtgttctctgtgtgggcatgaaaacaaagaaatgcccctactgaagactgggctcaaaggaccaatgcagggctggttcttttaccccttggtttactcctgcacttgtcttactcattctgaatctctaccagctgctcccagaatcacagatactcaggaccatctcaggcatccaggcatggcaaagtggaaataattcattttggcctgcaaaccttcaactcccatctttccccaagaagtcagagatgctgttacttgaatgatttaggaaatgagtgtgtgcaccaaagacaaaaagatattgtctattgtttgtgtgcttgttttgcgctatggaacattttttaatttattttaagataaattattaagttgaaaatgtgtgtccctattcagaagtgaaagattcatcttgtaatagttaaacctccatcttgaagcttctatggttcatagtctttgcacaggaacctgtggttttaacaaaccaatacacatattgaagaagtcattttaattcagtgaaacgaagatgggcttttccagatcacctgcaatagcagcagtgggataaaatgatttaaaaacactgtacaatttaactctgcctctcttgcagcattgcttctcacaactattacctgcatctgaaaaaaaatctatagactccagctgctacattagagcataagagatgctctcctgggacctcagtaccctgccttcttgactggtttccgttcatcagtcctgtccctcttcaagtaatctagaagaatgtggatactcttaggcgtgaatgtaaatgccttaatattgaaggtcctggttagaagcatgatacaagacatctactggattcatatttacaaatatcctggaatgttatagcttcaaagtatattagaaaaaccccaaagatggtataatctttaagtgtgcacgttcgtttatttctgcatcttccctccaaacttgcctttgcatcttaaatatttcactatgcacactcccattcctcttgggtttcatcttgtcgtttaagaaatgtactgaaataatcattggaatatttgcattttgcacaatgactggtatgatagctcttgacaaataaggaaagcactgaaatgttgtgattgggtctcgggaaatgctcagattgatgtcttaccagcatttcttctgggcttgtgatgttgagctgtagtcttgtagccataatgagcaaattgactaagagaagcaaaggtttcttggggttattaaccagtagtgtggaaatactagttttatgtggccaaggaaaagcaaagccttttcttttcagtttgtgttatttggaagacagaaaaacatcttgtctacatcctttggctgtttgtaggatcacgttgtccttacgatactgaaactttacagctgctgtaaattttttataaatgaatttcaaaatgttataatgggactgtaggttgtttttctacatcttcattatttggacctaaaaccagtttttaataagaaagtttatctttactctttctgaaattatgactccag

SEQ ID NO: 2 - DNA, 7597 bp, Homo sapiens
cgctaggaaagggaactgggttgcgacggtccggcgagagagagctggggtgctggggtgcggggaagttggggagcagaggccgcttggtgtccgagtagggtaagaccgcaccgacccagtccgttaggaaagaagggaaacgaggcaattgtcgggcggatccccggacggagggctaaggttgtgtggaaggcgctgctccccggatggcgaccgcagatactccggccccggcctccagtggcctctcgccgaaggaagaaggggagcttgaagatggggaaatcagtgacgacgataataacagccagatacggagtcggagcagcagcagcagcagcggcggcgggctgttaccctatccgcggcgaaggcctcctcactcggcccggggcggtggatctggcggaggcggtggctcttcctcgtcatcgtcctcttctcagcagcagctgaggaatttctcacgctcgcggcacgcgtctgagcggggccacctcaggggacccagcagctaccgacccaaagaaccgttccggtctcatccgccttctgtacggatgccttcgagctcactgtccgaaagcagtccccggccgtctttctgggagcggagccacctcgccttggaccgtttccgctttcgaggcaggccttaccggggtgggagtcgctggagtcgggggcgaggagtgggtgagcgaggaggcaagccggggtgcagacctcctctgggaggaggagcaggatccgggttcagcagcagtcagagctggcgagagccctctccacctcggaagagctccaaaagttttggaaggtctccatcaagaaaacaaaattattcatcaaaaaatgaaaactgtgtggaagaaacttttgaagatttgcttttaaagtataaacaaatacagttggaactagaatgcatcaataaggatgaaaaactagcattgagtagcaaagaagagaatgtgcaggaagatcctaaaacattgaacttcgaggaccaaactagcactgataatgtcagtattacaaaggattcaagtaaagaagtagctcctgaggagaaaacacaagtcaaaacttttcaggcatttgaattaaaaccactcaggcaaaaattgactttaccaggagataagaaccgtttgaaaaaagttaaagatggagcaaaaccactttccctgaaatccgacactactgattctagtcaaggattacaagataaagaacaaaatttaacaagaagaattagtacctcagatattctgtctgaaaagaaacttggtgaagatgaagaggaactatctgaattacagcttcgccttttggctcttcagtcagccagtaaaaaatggcaacaaaaagaacagcaggtgatgaaagaaagcaaagaaaagttgactaagacgaaaactgtacagcaaaaagttaaaacaagtacaaaaacacattcggccaaaaaagttagcactacagctaaacaagcattgaggaagcagcaaacaaaggcatggaagaaactacaacaacaaaaagagcaggaaagacagaaagaagaggatcagcggaaacaagctgaagaagaagagagaaggaaaagagaggaagaaatcagaaaaattcgagatctctcaaatcaggaagaacagtacaatcgattcatgaaattggttggtggcaagaggagatcaagaagtaaatcttcagatcctgacctgaggcgatccttagataagcaacctactgatagtggaggaggcatttatcagtatgataactatgaagaagttgctatggatacagatagtgaaaccagttctccagctccttcaccagtgcaaccgccatttttctctgaatgttcattggggtatttttctccagcaccatctctttctttgcctccaccacctcaggtttcttctctgccacctttgagccagccttatgtggaaggcttgtgtgtttctcttgaacctctacctcctctaccaccattaccacctctcccacctgaagatccagaacagcctccaaaaccaccttttgcagatgaggaagaggaggaagaaatgctgcttcgagaagaactacttaaatctctagcaaataaaagagcttttaagccagaggaaacatccagtaatagtgacccaccttcacctccagttctgaacaattcacatcctgtgccaagaagcaatctatcaatagtcagtattaacacagtgtctcagcctaggatacagaatccaaagtttcacagaggaccccgtcttccacgaactgtgatctcgcttccaaagcataaatcagtggttgtaacactaaatgattcagatgatagtgaatctgatggagaggcttccaagtcaacaaatagtgtttttggtggattagagtccatgattaaagaagcaagacgaactgctgagcaagcttcaaaaccgaaagtacctccaaaatctgaaaaagaaaatgatcctctgcgaacaccggaggctttgcctgaagaaaagaagattgaatatagattgttaaaggaagagattgccaaccgtgagaaacagcgtttgattaaatcagatcagctgaagacaagttcatcatccccagcaaactctgatgtggaaattgatggtattggcaggatagcaatggttactaagcaggttacagatgcagaatcaaaactgaaaaaacataggattctcttgatgaaagatgaatctgttttaaagaatttagtgcaacaagaagctaagaagaaagaatctgttagaaatgctgaagcaaagattacaaaacttacagaacagcttcaagcaactgaaaaaattcttaatgttaacagaatgtttttgaagaagcttcaggaacaaattcacagagttcaacagcgtgttacaattaagaaagctttgactctaaaatatggagaagagcttgctcgggcaaaggcagtggccagtaaagaaataggaaaacgtaaactggaacaagatcgctttgggccaaacaaaatgatgagactggacagttctccagtatcaagtccaagaaagcattcagcagaactaattgctatggagaaaagacggttacaaaagctagaatatgaatatgccctgaaaattcaaaaattaaaagaagcccgtgcccttaaagcaaaggaacaacaaaatatctctccagttgtggaagaggaacccgaattttctttacctcaaccctcacttcatgatctgacacaagataaattaaccctggacactgaagaaaatgatgttgatgatgaaattttgtctggttcaagcagagagcgaagaagatcttttttagaatccaattattttactaaacctaaccttaagcacactgatactgctaacaaagaatgcataaacaaacttaataaaaatactgtagaaaaaccagaactttttctagggttaaaaattggtgaattgcaaaaattgtattcaaaagctgacagcctaaaacagctgattttaaaaaccaccacaggcattacagagaaggttttgcatggtcaggagatttctgtagatgtggattttgtcacagcacaaagtaaaacaatggaagtgaagccatgtccttttagaccctaccatagtcctcttctagtttttaagtcctacagatttagtccatattatcgaaccaaggaaaaacttcccctgagctcagtatcatacagtaatatgattgaaccggatcagtgtttctgccgttttgatttaacaggaacatgtaatgatgatgattgtcaatggcagcatatacaagactatacacttagccgaaaacagttattccaggacattctgtcatataatctgtctttgattggttgtgcagagacaagtactaatgaagaaattactgcttcagcagaaaaatatgttgagaaactttttggagtaaacaaagatcgaatgtcaatggaccagatggctgttctccttgttagcaatatcaatgaaagtaaaggtcatactcctccatttacaacctacaaagataaaagaaagtggaagccaaagttttggagaaaacctatttcagataatagcttcagtagtgatgaggaacagtctacaggaccaattaagtatgctttccagccagagaaccaaataaatgttccagctctggatacagttgtcactccagatgatgtcagatactttacaaatgagactgatgacatcgctaatttagaagcaagtgtgcttgaaaatccttctcatgtacaactttggctcaagcttgcgtacaagtacttgaatcaaaatgagggggagtgctcagaatccttggattctgctttaaatgttctggcgcgagcattggaaaataacaaagacaatccagaaatttggtgccattacctcagattgttctcaaaaagaggaaccaaggacgaggtgcaggaaatgtgtgaaacagctgttgaatatgctccagattatcaaagcttttggacttttctacacctagaaagtacctttgaagaaaaggattacgtatgtgagagaatgttggagtttctgatgggagcagccaagcaggaaacatccaatattttgtcctttcagcttttagaggctcttttgtttagagttcagctgcacatatttactggaagatgccaaagtgcactggcaattttacagaatgcattgaaatctgctaatgatggaatagtagctgaataccttaaaaccagtgatcgatgtttggcatggttggcctacatacatcttattgaattcaacattctcccttcaaaattttatgatccatctaatgataatccttcaagaattgttaacactgaatcatttgtaatgccatggcaagctgttcaagatgtaaagactaatcctgacatgttgttagcagtttttgaagatgcagtgaaagcttgcacagatgagagccttgctgttgaggaaagaatagaggcctgccttccactttacacaaacatgattgctctgcaccaactcctggagaggtatgaggctgcaatggagctttgtaaatctttattggaatcatgtcctattaactgccagttgctggaagctcttgttgcattatatttgcaaacaaatcagcatgacaaagccagagcagtgtggcttactgcatttgaaaaaaatcctcagaatgcagaggttttttatcatatgtgcaaattcttcatcttacagaatcgaggcgataatcttcttccatttttgcggaaatttattgcatccttctttaaaccggggtttgagaagtataataacttggatctgtttcggtatctcttaaatattccaggaccaattgacattccatctcgtttatgtaaagggaattttgatgatgatatgtttaaccaccaagttccttatttgtggctgatttactgcctttgtcatcctcttcaatcaagtattaaagaaacagtggaggcatatgaggcagcattaggggtggctatgagatgtgatatagtacagaagatatggatggattatcttgtctttgcaaataatagagctgctggatccagaaacaaagttcaagaattcaaattttttactgatttagtgaatagatgtttggttacagtccctgcccgataccccattccttttagcagtgctgattactggtccaactatgaatttcataatagggttattttcttttatttgagctgtgttccaaagacccagcattccaaaaccttggaacggttttgttcagttatgccagctaattctggacttgcattgaggttacttcaacatgaatgggaagaaagcaatgttcagattctgaaacttcaagccaagatgtttacatataatatcccaacatgcctggccacctggaaaatgtaatgcaacaatcatgtacatgtttttatagctattgcttttatttataaggtttgctccagacaggtaaatctgaaatgacatctatatatatatatatatatatatattttttttttttttttcctggacagattgctattcttaatttagatttgtttttagcatttactgaggtttaatgagagtgagtactcattgaatagcctctaaaagcaaaaagcgtagacttttaattttctttgaaggacaacatttaggtgacagtactgttatcaaacaaatctgctacagacattttaagaccacctcttgaaatggtggtgtgtcacctgttgtagtctgatttcttctttcttttaaaggtgttagtgctaggtatttttgactagtaattatgaggtgttttttttttgttgttgttgttgttttttttttctcctgtgaacgttatttatgttcaaaacactggtctgcttttttcttgtaaagttgataaaaattgttgaatttttcttttcactataggttttcctccttggaagtttagcctgttaactttcaggaagttttgtactcagattcccacagtcagtattctgccagtggtggtgtttcattttgttcaaagatatataaatttttcttttcctttttctatatttcttttttttttttttctcttagagccattgctgctgagattgttctaaagggacaaagagaggtccaccgtttatatcagagagccttacagaagttacctctttgtgcatcactgtggaaagatcaactcttgtttgaagcatcagaaggaggtaaaactgataacctgagaaaactagtttccaagtgccaagagattggagtcagcctaaatgagctcttaaatttaaacagtaacaaaacagaaagcaagaatcactgaacactgggtgcagtcagttctaagtccttataataattgccaaaattatttgaatgattcttcaagattaggctgatccctggctaaggtctgtgtaaggcagacaagcgttattgatcatatcaagttccctacaatatcctgtcctcaaaaccggaagcaatgaacatgatcctcttcggttggataaatgaacttcctgtttggcctgcttctaggccctgccagattctcataacatcatatacgtaagtatagttcctcaaagtgactgacatttattttaattttgctttgtttttttttattttctcccccattcctttattttgtgttattcctgactcacttgacactctctgatgcctgagagattcctgtttgggatttaatatccagggctgtgtttacagtaaaaaaagcaggcagtcccttttagtttttcctttttaaatttttttgagattcttcatttcaggatttaaaactatagcagtccatcttaaggaaagtgtaactgccatggccacaagtctgctagttgcacttgaatgctctatcagggttgtttattaccctttctacgttctggactccttgccgagactgtttaacttgaagattaaagaaactattgcaaatgccagtgcatcagaacctaagagtggtcaaatattatgtgcaatttttttgtaaagaaattttaatttataataaagtttaacagttt

SEQ ID NO: 3 - DNA, 14709 bp, Homo sapiens
agggaattctctggggctttggggaatttagtgcgtgggtgagccaagaaaatactaattaataatagtaagttgttagtgttggttaagttgttgcttggaagtgagaagttgcttagaaactttccaaagtgcttagaactttaagtgcaaacagacaaactaacaaacaaaaattgttttgctttgctacaaggtggggaagactgaagaagtgttaactgaaaacaggtgacacagagtcaccagttttccgagaaccaaagggaggggtgtgtgatgccatctcacaggcaggggaaatgtctttaccagcttcctcctggtggccaagacagcctgtttcagagggttgttttgtttggggtgtgggtgttatcaagtgaattagtcacttgaaagatgggcgtcagacttgcatacgcagcagatcagcatccttcgctgccccttagcaacttaggtggttgatttgaaactgtgaaggtgtgattttttcaggagctggaagtcttagaaaagccttgtaaatgcctatattgtgggcttttaacgtatttaagggaccacttaagacgagattagatgggctcttctggatttgttcctcatttgtcacaggtgtcttgtgattgaaaatcatgagcgaagtgaaattgcattgaatttcaagggaatttagtatgtaaatcgtgccttagaaacacatctgttgtcttttctgtgtttggtcgatattaataatggcaaaatttttgcctatctagtatcttcaaattgtagtctttgtaacaaccaaataaccttttgtggtcactgtaaaattaatatttggtagacagaatccatgtacctttgctaaggttagaatgaataatttattgtatttttaatttgaatgtttgtgctttttaaatgagccaagactagaggggaaactatcacctaaaatcagtttggaaaacaagacctaaaaagggaaggggatggggattgtggggagagagtgggcgaggtgcctttactacatgtgtgatctgaaaaccctgcttggttctgagctgcgtctattgaattggtaaagtaataccaatggctttttatcatttccttcttccctttaagtttcacttgaaattttaaaaatcatggttatttttatcgttgggatctttctgtcttctgggttccattttttaaatgtttaaaaatatgttgacatggtagttcagttcttaaccaatgacttggggatgatgcaaacaattactgtcgttgggatttagagtgtattagtcacgcatgtatggggaagtagtctcgggtatgctgttgtgaaattgaaactgtaaaagtagatggttgaaagtactggtatgttgctctgtatggtaagaactaattctgttacgtcatgtacataattactaatcacttttcttcccctttacagcacaaataaagtttgagttctaaactcattagaattgttgtattgctatgttacatttctcgacccctatcacattgccttcataacgactttggatgtatcttcatattgtagatttaggtctagatttgctagctccaagtaattaaggccatgtaggagagcatggtaaccacagatagaactggtattatcccaagtggtctgcagactgctgagtggggatgggatctgctctctgttgagagttggtaatcattggtttgaaatgtgatgaaaccactcaagccaatgaaggtgggtgtgtaggtggggagtactttgccataatattttaaaacattacctggttagagttctaagtggtacttatttttgtttggttaggggaaagcctgaataaaaacagaaatggacacataatatgcatattccatagtctttgggaggctggaatgtgcctgggatttgggtctaagtgtatgcgtaattcttacctcactaaagaatttgccttgtttttttccttttggtgagtgactaaaacgtctgggcttccctgtgtgcgtgctacagtaagcaagcagaggctgtgcaaaggtgtgagcaggatcacgtggaatctggaggatacatcttggcttgcaaactgcctctgtctcctgggtgggactgttctgtccttgcactgctgttctgtgttacctcttggggtgtaaggttttgcttacaggagacaaactttgggcgtagaatggaagccactgccagcctctgtgctgagaaggaaggtgcttgtttcaaagggagcagcaagggaggcttgttctactcacctgggcctgtttgcctgagaaggggagataagggctgaactgggactagccagggggaccaacacaaatggtgggggatcatgacctgaaggattctttccttcccatgagctgcagggctggttgccgtccttgcaactgtgtcttatttgcctgtgccgttatatcttggtgacccctccacgtgtacactactgacaaacgggtggagtgctggggagaagtcactgtgccgcccacctagtaaaccttctgtctgtgctcatggcatctccaagatggggcactgctgtgtgcagaatccagggtcctctttctgcttgcaactcctttccctggatgccccagaaacaatccaggcctcctttcctatcttacccctttgctttgctttttaccccagcacctctataaccgccttctcttcttttcagaactccttgtttctcatcctgttttttatgattacaaaactcttgcttccaccctggaagataactgctatagatgcctgtatgtaaatggtgctgtctccagcaactggcatgctgaagaagaattgattcacggggtataaatgttggggattggaagtggggatgaaatggcacttgttgatacaggagcagagaggtgaggccgactgctgaagacagctcgccaccctccttgcctccactccaatccaggggctggggccacattctttgccttcatttatcctcagatcaggtgagatcgacaggaggtgttgatggcagtgccagcaattattgctaatccgtttgcatccttatgcatagatctgaattcagactttgtgaatttccagaggtgtgggtaatataatagaattcagtgagtgggcatggctgatcttgtgcaaattaaaagttatggggcataagaatagcaaaagttgaacttcttttaaaaaggaaagtaccctgagagccagtattggttgaggctcttcagtatgcccaggttggcagcactgagaaccgcaggaacggcctgttgttacaaaaaggagattgactcagctgcccttggtgcatctgactgactatgactgctgagagattccaaggacccttaatgccagggctaacctctccatgtgcagtgagacctctggaggaagtgtcatcctctggctttgtgtggtactcattatggtgcagtgcgggcatgaaatgaagacacccaaataggcttacagatacgatatgttttaaatgttcgtatttaacaaaaacatactgacactgtttggaaatggcaacaggaagatagcaaaatgaatactaacattacgaaaagatgaacaggtacatgttccaaggcaggtggctgtgaacttcctctgagtgaaggcatcccctccagcacctttcagcctgctagttaggacgacccgccgccaccctccaggacctccagccctgcactgcctttcctctcttttaaataattcttcattgagttctaatatgtaaaaaaaaaaagtttactgtaaagtttgcaaataaggaaattttttttaaaagtcctcagtaatcttaccagtaacaattgttatgggcacatttgcttttggaagatttcttttgtatgcatgggataagtacatttttaaacaaaaatgggattatgccataaattctattttgtgactttaatatatagtgaacaccttttttaatgatgacaggatgttcccttgcatggctgtatcaatttaaacaatcttgtttcaatgggcatacagggtattttctagtttttttttcctcttagaaaataatacttgcgatgactttccttgtagctcagactttttcacgtctgttgttatctctttgggaatgctgaatacatacatttcgagaaggaaatgactgttaaactcttaagacttcaggttcatattgctaaactgcccagcagggagggattttttcaattagtgttctcactggtgaggcaaacctgatgccttcccctcttcctcagaaccggctttatcacattgaaaacctttgctcctccgacggatcgagtctgctttccctgtggatgtgagcattgctttgtctgctggtgactgaacatctctaccatgtgtcaattggccatttgtggtgtgtgtgtgtgtgcgtgtgtgtgtgtgtgtgtgtgtgtatgattttctaattcctagtcatttttctattgattgttttgcaaaagccatttacatcttaaggatattgataatcttttgttatatttgatgcaaatatttttttccagtttataggttgccttttaattttgtgtttcaggtagataaaagttaaacgattttcttaggttagtttatcactgtggtttctgaacttgttatgtgtagatcttttccaccccaagagtacataaatattaatccatactttcttatggaacttgtatggtttcgttttttacatttaaaccttcttccccgtggtgtgtgttgtggaatctgtgtttgtgtgaggaggggcatggtgctctcagaacccacctcctgtggccagagagccctgtcctgtgagggtggttatcacagtggcagggttcaattcagaagaccttgagggcaggctgatgtttcctgaatgggcccctggttgttgcttgtccctgactctccatttccccatctgagtggatttggacctaatagggcactggagctggttcgaatcctgactggactacttggcaactttatgtctgggagcaagttacttaacctccccaagcctgtgtctgtgaaatgcgggtaaatgaatgtagatgtttggcagcagctactccttgttgagctctcacagtgaactctcctgcctctgccctccttccccgcctcccctggtgcctagcgtcaggtctagccacttcctcctgggcccctctcccttttctgtggctggctgcctgcccgcctggcgctggacctttcatgtaacgggaatcagcatgtatattctggtctggtctgtttctacacttaattttgtttccagtagtatttccctgtaccggcagagttcacaaacacatttgaagaggctttttctcaggattcttaaccttcccaaaggaagtcccatggatgggtttctagaagtctataaatgctctgaaattgtatttttctgtggaaagcataactttcatctgcttgttcgtgctcaaaaaagatcatgaatgaatgattgcatgattttatgccattgtgcttatactaaaggatatgtagcccatctcttgagctgttaaactgttttgactactttaaatcgtgcagctgtgagcatctctgtaaatttagtgtacacatgtatcccctggagtggcattgcctcggcagtgagcacttatggttttataactctcttcacagactcaaatgactccagaaagctacacttcctgttgtgagtatatgatatccatttccctacatagccactaacatcaggtttttacaattttatttatttcttgctactttaagaaatttttgtggtgaaatacatataatagaagttgactatctgaatcatttttaagtatacattcagtagtgttaagtatgtcgccattgttgtacaaccaatctccagaactttttcatcttgcaaaacaaactctgtacccattaaataacattaaacattccattccctccagcctcagcaaccccattctactttctgtttctgtgagtttgactattccaagcacttcatatcagttaaatcatgaagtatttgtctgtctgtgactggcttatttctctgagcacagtgtcctcgagatgcgtctatgttgtagcatatgtcagaatttccttcctttttaaaagatccaaataatattcttattttatatcttttttttatccattcatccattagtggacacttgggttgcttttggctattgtaaataatggtgctatgtacaaatatctatattattgtatttacaagtataatgctgtaatgtacacacatctttttgagatcctaccttcagttcttttgagtatatagccagaagtggtattactaaatcttacgatatttctatttttaatttattgaggaaccactgtagtttttcatagcaactgcaccattttacgttctcaccaagagtgcacaagggttccgaggttcccacatcctccccaacacttgttattttctgctttttttagattgcagccatcatagtgggtgtgaggtgacatttcattgtggttttgatttgcatttccctaatgaggagtgatgctgagcatcttttcatatgcttactggtcatttgtatgttgtctttggaaaaatgtctattcaagtcctttgactattttaaaaattgggttattagagttatcgttgttgttgacttgtaggagtttctttctatattctggatattaatcccctatcagatatatgatttgcaaatatcttctcttattccataaggttactttttcactttgttgattgtgttctttgatgtatagaagtttttagttttgaaatagtctaatttatctgtttttacttttgtggtctgtgcttttggtgtcatatccaagaaatccttgccaaatccaacgttataaggtacttttaaggtattttagttgtcttagtctatatttctgtactcacctttctttatccactcatcagttgatgggcatgtaggttggttccatatctttgcaattctgaattgtgctgtgatcaggtgtctttttagtataatgatttactctcctttgcgtagatacccagtagtgggattgctggatcgaatggtttttataattttctattttaccacagtttctctctgcatttttcctctttgaccactaaccatgtgaaattctcatattgacctttataatgatcatgaactcttagtatcattgggaaggccacatttgccacttatgattgtaaaccttatcctccatttttcctgttattgttggtgcaaaaagcacctattataccaggactttaaaaatcagtctgataagtctttgataagtctaataataataactgataagtccattgaatttgcttctgattactttttctttagtagctaaacatgtatgtactcctatgattacaatgaacactcctctccatttaaattaattatttacattgatgaaatagcaaaatgttaatgactaaatactgtcttggttttttcgttccaggtcagtcaatattaacttcttataattttcttttttttctttatgtgtgtgtgtgtgtgtatttttttttttttaatttcaatggcttttggggtacaaatggcttttggtcatatagatgaattctacagtagtgaagtctgagattttactgcaccggtcacctgagtagtgtacattgtacccaatatgtggttttttataccttgcccccctcttaccctccccactttgagtctctagtgtccattatgtcactctgtatacctttttgtacccataagttagctctcacttataagtgagaacacacagtatttggttttccattcctgagttgcttcacttagaataatatcctccagctccatccaaaattgctgcaaaaaaaaaaaaaaccacaaacattattttgttcttttttattgctaagtcatattccatggtgtagagataccacattttatttatccactcactggttgatgggttggttccacatctttgcaattgtgacttgtactgccatcaagtgtctttctggtataatgacttcttttcctttgggtagatacccaggagtgggattgctagatcaaatggttcttaacattttctctctggatctatttctggaaattttaggctccagtttttgttgttgttgttaataaaatgcaatggaatgtaatgatcatcacttttcattatgctttaaaatctggtaaatggaggctagaacactcctgtaaggcaagaatattctctctgttggaactcaaatacacagaactgggtaaatctcaatcttaatctttgattcaggacacaacatggctctcttttacttgctttctttaattgttttttaataatgtggtaagcatttctgaatctcctatccaatacaaaaactaggacaatacagacagtaactcctatggttacaatgaacactcctctccacttaaattaattatttacactgatgaaattgaaatagcaaaattttaatgactaaatactgtctttgattttttgttccaggtctgtcaatattaacttcttataattttctttttttttctttatgtgtgtgtgtgtgtgtatatatatatatatttaatttcaatggcttttggggtacaaatggcttttggtcatatatatgagttctacagtagtgaagtctgagattttactacaccttccacttatgtggtcccacaccacccgcctcccctgccgcctcctgccaccccctaggccaaggtaataatcatcctgaatcctgggtttatctctcacttgctttcttttcatataattttgcaaaagaatctgatctaaatgtgtttttcagagtatatatttatattttagctgttcttagagaaaatttattattttgcatgtaatcttatggaacattctcatttaataccatggtaagattcagcccttgcccaggggatagttcatttagtttgtttactggatagagctcatcatgtgactatacctcagttagtttatcagttctcccatccatggtgactaggttgcctctcagcctctcaacaacactgtttctcagtgtccttgtagaagtgatatgtgggtgttttctccttacacagagttgaaaggtgacgacaacaacgttggcactaccaatcccccaccctccagaggggtaaccagtgttaccagtttgctgtgtttcctgctacacctcgccttattcacttccatttgtatctgaaaaacgtgttgcatggtttcttttctatagaagtggtaaaatgctattgtgtcctgtacattattgattactttttttcatttaacagtagggagatgcctgggagtacacagagaactgccctcattgttttcaacttctgcactgtatgtctgtgagtttagccattctgctgttaatggaaatttacagtattctaatcttttgatattacaaacagttctgtgcgatcatcgtcatacacaaccccttgtgcacaatgcatgagtgtttctcagggtaggtaccaagaagtgaaattcctgggtcatagggcgtgagtccgacatttttctccattctgccctgttgccctccagagtgggtgtccagctttgcatacctaagtatgagagtatctgttgttcatatcctctacgacgctccatatatgaaacttaagtttctgctagttgccatctttgatctatcatgtatgcagtgacctactaagactgtaattggtacagtagattcttgtcatctgtgtgtgaatttagcattcatgggcttaatgctgacaaggcccccagggtccaagacatataatcatgtataattttgtcaaggtataattttttaaattgcttttgtcatgtgtctgctggtgatgcccaacccagtgctctgcacccaggtcacactgtggctttgtcctctgcttatgcctgcattgcagcaactgtcctgaagagaccaaaattatgcagatttaggtaagtccatggctaatgttattatattatgtgctattgtaatggatggggctgtggagtgtatgaatttataaatcactggtcttgtaattaaaattcaaacactatagaaaaaggccatgtagaagataaaagttcctctataatcccggacccctaagataactactaatgacaacttcatttatattccttcagacattttctggctgtggatgtactaaaatgtatcctattattctctgccctaaaatggaatcatacaaggtgtactgttatttttatggctctataacatgtcatattgtacgtgttggtatggtcattttaaccatttttctagtgatggctttgaggttatttgcagtttcctagccatctcaaagtgtgctgcggggatctcttttgcatccctctgggtgcagagctgaggcacccagaggcagtgtccagaggaggcagcatctgtaggtgtcttcacctgctctggctcttggcacatctggttggtgacactgttttgtgagatgggttgaaagcacgtgctgccaaaatagaataatgttggtcctctcctcatgtgccgtggaactggggtaaaactgcgtagtggctgcagctgcctgtccataccggaatcgagtataacacggtgcctggcttagcacaaaacagtagtgggtcctgcaggccccagagtctaattcctggtattctttcccctacacagattaaataaaccaaaaacaaactattctaggaaagcgtctgtgacatttgtaaaaagtggtatttaatgatcttttattcacttgtctgtttagtttgttgaaatcttaagtggcatcctggtctgggaaggagtgctgtctgcgcctgccctccgctgggcacagcgtggctgcttcaggggctaagcacacactttctgtcttctaaagggccgccacatgccaggagctcaggtgtgagcccggctctggctcttacctcatagggtcactcataggggcacagggagcagaacattgtacacagcgaggcaccacccggcttggcatctgcctcggtggacttactacctctagaaggaaatacctgagttcctctggcctcagctcctagagtgactggtgtgctgtccctgttactcttctgtcaaggtgacaactgtgtgacccatcatctgtgtgtcaaagcaaggccctgcctgggcctctgctcctgtgctgaccccaaaggcaaatgctttgctagtttccttccagttaatttcacctatgaatagatgtgtgaaaactgttcaaagccatacctgcacatgtttgaacttcaaaccctgtgggtgattcagtggcatctttctctaacccccagcctcccttcccacagaggccaccgtcatggccagttgctgcagtttctttccagagaacctgtgtatgtgtaaagctgtacaggcgtgggtacaccacacagcctgtcttgcactgtggactgttgagttactagtacatctaggtaagcaccgcatatctgtattcatgtctgccttggtcttttcaacatctgtgtggtagccgtgtttgaattacccattccctttttggggaaccattaagttgtttcagcaatttttactgtagataaggctataccgcatatctgtgtacatgggtttttatgtacatgggcaagtatatctgtgagagaaaagtttcctcaggaggaattctgggcacagcatgtgtaaatttctaaatatgatggacacccccagcttccacctcaaggaggttggtcccattgacatttccccacaccttcacccaggctgtgcccttaaacttggttatttgtcaatgtgagaagtggaaaatagtatttaattgtagtttggatttgtatttctattgggttgtatacttactgattaataataagagctctttacatattaaggaaattaacccttttcaaatacattcctatttctcactaatctttaagttttattgtaatattttgctctttagtttatatatatatgtatatatatatatatgtatatatatatatatacatatatatatatatatatatatatatatatatatatatatatatatatatatatatatatatatatacatatatatatacatatatatatactaattttcttttatggttcctggattttgtgagtagtttgaaaaggctaatccagctgaagattttgttgttgttgttaaaccccatgttttctcctaactctttttatttttattttggaggactctatctagacttaattttagcataacaagtgacagggttagttagcctgttgtccttacaccattttctggctaatacagctattaactattgatctgtctattcacgtgccagttcctaatggttttacatagtgtaatctgcacttcaaaatagcgaagggaagccctacctcattattctacttttccagaattctcctggctattccaggctgcatgtttaccttaaccttccctgtgatgtcttcatgccgttgtcttcttatgcaagaataaggtacgtctttccatccactcacgtctatttaatttgactttgcattacacagaaagctggtcttggtctgtctacctcggcatctagttgtcctcactgccccctagccgaccccaccccatctgactgactaccccatcacagagtacttttatttacgttttgctctgcctaatggttacttgatactgtcacgccgacagtgtccagttcagtggtctttgcagttgaaatgctcccgtacacactgtcttgttaaaaatgccagtaagttcatacaaacccagcttgcacccaaggtcacattcagagagcgtagggctgggatgggttgttttccaagcttctgccactgtgtggctagctcttcccactgggaagttctgtgtacccggaatgtcggagtggagtcctgttctagtgtccagcacctgaccctgtgcccaacccctcaacagcctattcctgctgtccacagcctgctggaactttttacaaaatatgttgccatgctggaccctgggcactggacataagccccctggcagcctttttcatgtcacccaaaggggtaattgtcctactggtggtctgtaagatgagttagggtgacttgctaatagacattgtaaatcttaatatttatgtatgtattttattattaccggttttccatttatgatggtaatattgtttcttctaagaatatttatttttccttctaaatattgagataaaattcatgcttttgaaatgttctattcagtggcttttagtatatttgctatgttgtgcaaccatcgacactatccatttctagaactttttcgtcatcccaaacagacgctctgtattcataaaaaaataacttcctacctgtctctccccctagtctttggtaacctttgttatactggtaaactttgttgtgctctctgtctgtgtgaatttgcctattctaggggcctcatataagtgtaatcatacagtatttgtctttttgggtctgtctgatttcacttagcgggttttcagggttcattcatgttgcagcatataacagtactgcgttcctttttctggctgaataatattccactgtatggatagaccccattttgtttattcacacatcatttggacatttggattatttctggtttttggctattatgaacaatggtgctatgaacagttgcgtacaagtttttgtgtgaacatatgttttcaattctctcattatatacctaggagtagaattactgggtcatatggtaactgtatatttttgaggaactgccaaactattttcccacgtccatgcaccatttcacattcccaccagtaagtaagagggttccaatttctgcgcattcttgccaacactagttattatctgactttctggttataatcattctaatgagtgtgaagtagcctctggtgtcatttggatttgcatttctctgatgagtgatgctatcaagcacctttgctggtgctgttggccatatgtgtatgttccctggagaagtgtctgtgctgagccttggcccactttttaattaggcgtttgtctttttattactgagttgtaagagttctttatatattctggattctagacccttatcagatacatggtttgcaaatattttctcccattctgtgggttgtgttttcactttatcgataatgtccttagacatataataaatttgtattttaaaagtgacttgatttggctgtgcaaggtggctcacgcttgtaatcccagcactttgggagactgaggtgggtggatcatatgaggaggctaggagttcgaggtcagcctggccagcatagcgaaaacttgtctctactaaaaatacaaaaattagtcaggcatggtggtgcacgtctgtaataccagcttctcaggaggctgaggcacgaggatcacttgaacccaggaggaggaggttgcagtgagctgagatcatgccagggcaacagaatgagactttgtttaaaaaaaaaaaaaa

SEQ ID NO: 4 - DNA, 6111 bp, Homo sapiens
aacaggtttgatctgtggatgaaatgaatcatgattttcaagctcttgcattagaatctcggggaatgggagagcttttgcctaccaaaaagttttgggaacctgatgattcaacaaaagatggacaaaaaggcatatttcttggggatgatgaatggagagagactgcatggggagcttctcaccattcaatgtcccagcctattatggtacagagaagatctggacagggttttcatggaaacagtgaagtaaatgcaatactgtctccgcgatcagaaagtggaggccttggtgtgagcatggtagaatatgtattaagttcttctcctgctgataaattggattctcgatttaggaagggaaattttggcactagagatgctgaaacagatggacctgagaaaggagatcaaaaaggcaaggcttctccatttgaggaggaccaaaacagagatcttaaacaaggagatgatgatgattctaaaataaatggcagaggtttgccaaatggaatggatgccgattgcaaagattttaatcgtactcctggaagtcgtcaagcctctccaactgaagtagttgagcgcttgggccccaatactaatccctcagaaggactggggcctcttcctaatcctacagctaataaaccacttgttgaagaattttcaaatcctgaaactcagaatctggatgccatggaacaagttggtctggaatccttacagtttgactatcctggtaatcaggtaccaatggactcttcaggagctactgtaggcctttttgactacaattcccagcagcagctctttcagaggactaatgcactaacagttcaacagttaactgcagctcaacagcagcaatatgcattagcagcagctcagcagccacatatagctggtgtattctcagcaggccttgctccagctgcatttgtgccaaatccatacattattagtgctgctcctccagggaccgatccgtatactgcagcaggattggctgcagcagctacattagcaggtccagcagtggttccacctcagtattacggcgttccatggggggtgtatccagccaacttatttcagcagcaagctgcagctgcggcaaataacacagccagtcagcaagcagcatcacaagctcagcctggacagcaacaggttctccgtgctggagcaggtcagcgtcctcttactcccaatcagggtcagcaagggcagcaagcagaatcacttgcggcagctgcagcagcaaatccaacattggcttttggtcagggtcttgctactggcatgccaggctatcaagtactagctccaactgcctattatgatcagactggtgccttagtggttggccctggagcaaggactggccttggagctccagttcggttaatggctccaacacctgttttaattagttcagcagcagcacaagctgcagcagcagcagcagctggaggaactgcaagtagccttacaggcagcacaaatggtctgtttcggccaattggcactcagccaccacagcagcagcaacagcagccaagcactaatctgcaatctaattcattttatggaagcagttctttgactaatagctcccagagtagttctttattttctcatggacctggtcaacctggaagtacatctcttggctttggaagtggtaactctttgggtgctgctataggctcagccctcagtggatttggttcatcagttggcagttctgcaagtagtagtgccacaaggagagagtctctatctactagctctgacttgtacaaaagatctagtagcagcctagcacccatagggcaaccattttacaatagtctgggattttcctcctctccaagtccaataggcatgcctctgccaagccaaactccaggacattcacttacgccaccgccatcactttcatcacatggatcctcatccagtttgcatttaggaggactgacaaatggtagtggtcgatatatctctgcagcacctggagcagaagcaaaatatcgaagtgcttcaagcacttccagtctatttagctccagcagccagctctttcctccttcccggcttcggtataataggtctgatattatgccttctggccgcagtagattattggaagatttcagaaacaaccgcttcccaaaccttcagcttagagacttgattggacatatagttgagttttctcaagaccagcatggttctagattcatacagcaaaaactagagagagctactccagctgagcgacagatggtatttaatgaaattctgcaagcagcctatcaattaatgactgatgtttttggcaactatgttatacagaagttttttgagtttgggagtctggatcaaaaattagccctggctactcgtattcgtggtcatgttctacccttagccttgcagatgtatggctgccgcgttattcagaaagcattagaatctatttcttctgaccagcagagtgaaatggtaaaggagctggatggtcatgtgctcaaatgtgtgaaagatcagaatggaaaccatgttgtacaaaaatgtatcgaatgtgttcagccacagtcactacagttcatcattgatgctttcaagggacaagtatttgtgctttcaactcatccttatggctgcagagtaattcagcgcatcctagagcattgcactgcagaacagaccttacctatcttagaagaactccaccaacatacagagcagttggtacaggatcagtatggcaattatgttattcagcatgtactggaacacggtcgacctgaagacaagagcaaaattgtttccgaaatcaggggaaaggttttagccctgagtcaacacaaatttgccagcaatgtagtagaaaagtgtgttactcatgcctcccgtgctgagagagctttactgattgacgaggtttgctgccagaatgatggtcctcacagtgccttatacaccatgatgaaggaccagtatgccaattacgtggttcaaaagatgattgatatggctgaacctgctcagagaaagataatcatgcacaagattcgacctcacattactactttgcgcaaatacacatacgggaagcatatactggccaagttggaaaagtattatttgaagaatagcccggacctaggacctattggaggaccaccaaatggaatgctgtaaattacaggagcaagagaaagaagataatttaaccatgtgaaaagaatttttttgtgtgtgaattatcaaaacacaactcaactatgaatcttcaatttttttttaaagcaaaactatttattgactttattcatccatttgtaaattttttaaggttcttgtgtatatttggggggtgggggatgaattataaattatattcagccctgagtggagacctatcagattggattgctggcaaagcacagaatgcctgtatatgatgtaactgtatcaaaaataaaaagctgtcacatattttgtaaatttttaccttgtaaagtcacaaaaatagtttttaaaggaaaaagtacagtattcttttaataaactggctcacagtctggtaggtctacaaccccatagcacaacaggtttatagagatgtatatagaattatagtccttatttttttcctttgcgtgaaaccttttataacagattaacaatcaactgcataaatattattaatattttaaaaagagttaagttgtattttgataattcacaaactatcatgcaaataacgagtaagtagacaagaataaagtggtttgagatgaaaagaacctaacattatttacagtagatgtggttttaatacaattactgccctaaaatgtctctggcaatgtacagaaatattgtatatacttacatatgtaattgttgtaagagttaaatacaaaatcatggtgacacttccaattaagtgcactaaatgaaaagttaagtcacttattaacttttcagtttggtttgcaatgagaaagagtggaaatttgtattttgttttgcttatagaattacagacatgttgaggaagtgttgagctttattttgctttttcatagaggcagaaagtaggaaccagatagagatgaaaaggggccactgaaaagtgaatttgatagctcagcatttaagcatgattacatattcagatagctctttttgctttctataaatatatgcattgtgtgtgtagtaatagatgtaagtttacactttgaaaggaaatcttgtttcaatgtttattataaaagccttgctaatttagtagtgatgctttccttggttgtacaggtgtacatttgtaaaccttcatgctgtaaatggaatttgttttatctctttgggatacatttgcattttagtgtacatttacgtccctgccctctttgacctggcaatatagtgttgtataatgtaaatttatttctccaaatcgagagtgattttttaaaaattttttatctttatatggtttcagaagtatgaaccagctttctttttattattgtgagatcattttgttttataacatagttgttgactgttaatatggacctgctagaatttggatcactttcaattgaagtcagggtattgtgcataatagaaagtattggactgagatatttggttaccatggaggccaatgcttttttcatcttattaaatgtgatgtgacttttttctttgtacagaagagtactgtatttttgaatagcctactcccaagtaagagcaaatctgtatgataacattttttcctctggacataagacataacagtaacacgatgtacatttacaagcggccttatgtacatttcccaacaatctttttaaggcaaaattgtgaccatatgtgtataattaaaatcgtttttaatcctttgcctatgaaaatattttggaaaaaaacttgctgtgtatattcagtttctgaaagataaagaaagtgctttgtattttgttgaagtcagtattttgtataaacatttatgttgacccacttatgttcagtgctgaaaactaaaatgaacatgctattctgtcagctgaatatggaagagatctttttttactagagatctgcagaagaaacgcaatcttctgagcacaatatggaatctaaaggttttatcacttagttgttcatattatgaacctaaaaataatggcataaagtttggggatgccaggcatactttttcatgtttggtgttgagttattttacttttctaacccaacattccttggtgagaccattaaatccaaacacttgtcaccgttccttctcatagtcactctgggtcatcagcatgtcccagtcactgcagcaacgccttgtgtttgtttcatttttttaaaacccacacaaagccgctgtctcactttttcctactttaccaacctcagagtatttcggcccgtatcgaacttttgttctcagtatcagcccatggtttcaggatcaaagctgtcatgttggagattggtaatggctttcctgtctttgtacagttgaattcctagtcttccttcatccttgccctctgttggcacaggcattatctctgcaattttagaaaatgacaagtagagaatactacattgagaaactaaaccctcttcttggggtcctgatactcattcccatttgtcccagtgctgacaacccaatcttcccaatactttcaggcctgctctacaaaagtacctgttcttgtagaaattttacagtctgccattttgggtgcccaccccaatttttaccttttagtaagttggcatgaaattttggtaaaatctgaaaatcacatttcagaataaaacaattgggcaaaactacctaggctttactcttgagtgtctccttttgatagggattgtttctggaccagtttgtctaagtcctggctcttattggttcatatgaaataatgttaacttcacttctttgtatattatgtataaattagaaaatgaaaaatgtgtgaataacattgtatgaaataaacctggtcttgtgtttttctctagataaaataaaaatctgtacctc

SEQ ID NO: 5 - DNA, 549 bp, Homo sapiens
cctttcctgttaggcgagagctgcgaaaggcgagagctgcgaagggccaggtgtcgggcgctgtttctcgttttcatcatatagacaaaacagccctgctgcaaagatggtcaacgtacctaaaacccgaagaaccttctgtaagaagtgtggcaagcatcagcctcacaaagtgacacagtataagaagggcaaggattctttgtatgcccagggaaggaggcgctatgatcggaagcagagtggctatggtgggcagacaaagccaattttccggaagaaggctaagaccacaaagaagattgtgctaaggctggaatgtgttgagcctaactgcagatccaagaggatgctggccattaagagatgcaagcattttgaactgggaggagataagaagagaaagggccaagtgatccagttctaaactttgggatatttttcttcaattttgaagagaaaatggtgaagccatagaaaagttacccgagggaaaataaatacagtgatattcttacgcaaaaaaaaaaaaaaaaaaaaaaaaaaaaa

SEQ ID NO: 6 - DNA, 676 bp, Homo sapiens
cggatggggcgtaggtgggcggtgcgcccacagctgcctgggtaaggcccaagatggctgtcttcgccttagtactcgtgtgaagttggcggggacggttcctgtcatcttcttgggcttatttggtgtgctgttgaaggggggagactagagaaatggcagggaacctcttatccggggcaggtaggcgcctgtgggactgggtgcctctggcgtgcagaagcttctctcttggtgtgcctagattgatcggtataaggctcactctcccgccccccaaagtggttgatcgttggaacgagaaaagggccatgttcggagtgtatgacaacatcgggatcctgggaaactttgaaaagcaccccaaagaactgatcagggggcccatatggcttcgaggttggaaagggaatgaattgcaacgttgtatccgaaagaggaaaatggttggaagtagaatgttcgctgatgacctgcacaaccttaataaacgcatccgctatctctacaaacactttaaccgacatgggaagtttcgatagaagagaaagctgagaacttcggaaaaggctcatctgtcaccctggagaagggaaactgtacttttccctgtgaggaaacggctttgtattttctctgtaataaaatggggcttctttggaaaaaaaaaaaaaaa

SEQ ID NO: 7 - DNA, 4796 bp, Homo sapiens
atgcgcctgcgcagaccgctggggacgggaggggcggggctcgaggggcggtcaatgcgcctgcgcacaccgcacggcgaagtgggggagggcagtccgtgtgtgtctgtgttgttgttcggcggcggcggcggcggtaagatggctgcccacgggggctccgcggcgtcctcggcgctgaaggggttaattcaacagttcaccaccattaccggtgcaagtgaaagtgtaggaaaacatatgcttgaagcgtgcaacaataatctggaaatggcagtcactatgtttttggatggtggaggaatcgctgaagagcccagtaccagttcagcaagtgtctctactgtcagaccacacacagaagaagaagttcgtgccccaattcctcaaaagcaggaaatactggtggaaccagaaccattatttggtgctcctaaaagacgacggcctgcacgttcaatttttgatggtttccgggattttcagactgaaactattcggcaagaacaagaattaagaaatggaggagctatcgataagaaattaactacccttgcagatctattccggccacccattgatttgatgcataaaggcagctttgaaacagccaaagagtgtggccagatgcaaaataagtggctgatgataaacattcaaaatgttcaagactttgcatgtcagtgcctcaaccgcgatgtgtggagcaacgaagctgtgaagaatattatccgggaacatttcattttctggcaggtttatcatgacagtgaggaaggtcagagatacatacagttttataagttaggggatttcccctatgtttccatattggacccacggacaggtcagaagctagtagaatggcaccagttagatgtatcttctttcttggaccaagtgacgggatttctgggtgaacatggacaactggatggactttctagcagtccccccaaaaaatgtgcccgttcagagagccttatagatgcaagtgaagacagccagctagaagctgccatcagagcctccttacaagaaacacattttgattcaacacagacaaaacaggatagccgctcagatgaagaatctgaatctgaacttttttctggcagtgaggagttcatatccgtttgtggctctgatgaagaagaagaggtagagaatcttgccaagtccagaaagtctccccacaaagatttggggcatagaaaagaggagaatagaaggccgctgactgagccaccagtcagaactgatcctggaacagccacaaaccaccaaggattgccagctgtggattcagagatactggagatgccacctgaaaaagcagatggagtagtggaggggatagatgtaaatggaccaaaagcacagctgatgttgcggtatccagatggaaaaagggaacagatcactcttccagagcaagctaaactgctagctttggtgaagcacgtgcagtctaaaggatacccaaatgaacgttttgaacttctcaccaactttcctcgaaggaaattatctcatctggactatgatattacattgcaagaggcaggcctttgtcctcaagagactgtctttgtacaggaaagaaattaacaccatggcttgacctctctcagcttaccccttttttcccttttcctgtgagatacatgtcactaagtatgcattttggctcataggaccacagagccaaagttgggcaagcaagtcaccttccttctcttatttcttgatctctcctataatcagtctctttctccccctttgtttctttctcctcttctgttttctcgctccccactccgtacccttctgcctccccctccccccacacttttctttcttacctaatctggtgaccaaactgaagtgtaaggataagacctctcctagtactagcagcaggaattgtgtgttccagtaagtggtctcttgcacggcacttttttgggatcaaatgttaacgttactccccagactcttcgggcaaaggaatggctagattcagagtaagaacaaccctcccttttttgtaagtccccgtgtttagcagggagaagaaattctctaacatgggtttggttttgttgtgttcttcatgtggaaatgtcgcttaacaaaatatccaggcttttgtttacgtggaaaaagcatcccttgtaatgattgctcatcatacttaaaaacctttttcaaaggattttcatgttcccagctataaggactatttccatgacatgtgttattggcagaatgagtgttaaatatggagcatatagcatggggtgactttcattgtcctaacctgagacagttttccttattactctgtattgatcctgctagtccaagaatggacatgaagtgaacctatcgtggtgactgggataggaaggtgcttgctatttttgccagcacagcatattagttcctttggagccctccattgtctgagtctgcagtgatctgtaggaaggcagctggtcaataatcatgtagtacaatggcttggaattgtaaccactatggttattgattgtcctgtgttgtttcaggcatacttaggtatgtccctggggaaaaagaaaaccattcagctgagagttgctaaccatgttcttttggttagaaataatggttcattttttgcccctggttggaatagtctctaaaaggctctggtgactgaattgaacatgagtccgcatgctgttttctttcaaaaggtatcaaaacggaaagcctctctaaggggaagacctttcaactccattcagaagacaacatttagtaaggaggatggcggaggttactagtaattttcagatgtcttgggctttttctgccaacaaaacccaaaatcaaattagagttggtgaaagctttcttcagtgtttttagaagaggccatcttgaatctgtagaataccatttacacatcaacttcaccctatgctcatttcgtattttgagcttaaatggagtcctctgaagggggggtagtcgtgattctggtggcaaaactagaacttttaacttgtaaaatgaaaaatattaaatggacctttttgtcagttgaggatttagattgattcttttatctgaggagcgtatgttcctcagatgttgcgtagagacctttaggttttcatctactttaagattgctctcttggcaattaggggatttgggaaaagaagaaaaaaagatgccatgtgttgctagtacacagttataggatatggtttctaatggttgaattttgaggaactctccctaaagaatgagttttatatctcctcaaggaaatcatggaaaaatctgtttattcttcagtgagtccttttgaattaatgttcttaaatttttttctaagtctgtgtaagtgcttatgtataagtatataattgtataaatatttataaatatatttatataattacggtttcatttctaccttgagtcaaagttctgtctttagattggtgactgagtaatacttacactttggtgttttttcttaggttcttgaggcttacttaactagcagcttctgatttattgagtgaaagatggttttcatgttaattcctcagttgcatctctgaacttggataacatacttgccgtttgaaaaatagagctgtatactgtcaaaggtgcactggagggtaaaacatttgttggtagtagacaagctcagaaatccaaaaattcagggagggcacagggtaagaagagaggtttgctcagctttgtgctctgatggcacccatctgtactccagcaaagtcatagctgaagcccaaatcgctcaaacgtgtgaagtcaatcatttttcctatagggctctgtttccttttctttaccttctagcttctcttgataaaacagttgggagaactgccaacgtgttcatcagtgagagggtgtggttctttccgatatgttcagcacgtgcatattcatttatgagaaaccaaagtaacttcttcaactcgggttactgtgggatgattaagtagatataaagtgatttaaaagacagcatggtactttcactcagcttaacatgcagctgggatgtctacaatacaagatgtggtgggttttattttattttattttgaggcaggagtgtaattatcttagggttgatataaaggcccatgggaagagttacggattgtacatgggaagaatccataaggagtattgccttgctcaagaatttaatccgctgacagtatgcttcttccagtttgccttacttcctctgcaagtttctttgctccttagggcagaggttttattgaatagattaaatgaggtcagtaagattagttaaaaatagtcattccttgtgggtgttggacacagcttgaaaggagtgtttaaaaaaaaaaagctagggaggaaaagaacaagaaagatagacttcgagagtgataagagaaaaatacagggagatggaatggaaactaccaggaaggccgggcgcggtggctcatgcctgtaatcccaacactttgggaggcggaggtgggcagatcacctaaggtcaggagatcgaggccagcctgagcaacatggtgaaaccccgtctctactaaaaatacaaaaattacctgggtgtggtggcgtgcacctgtaatcccagctactcagaggctgaggcaggggaatggcttgaacctgggaggcagaggttgcagtgagccaagatcgcaccattacactccagcctgggcgacaaagcgacactccatctcaaattt

SEQ ID NO: 8 - DNA, 709 bp, Homo sapiens
ctaaaatacaaaaaagggagacaggtatatttacaaaaatccatggctggtacagtacataatttttaagacacactaaatgctacaatctttcaggtcctgagattattacaaacatcaactcaaagcttgtgttcaggtccagtttttaaaggaggaaaaaaaaatcccaaaatattaagtcacacacttatttgaaatacagtatatcccttcaagttagcaaaaacacacctccctataagcaaatgcaatacagtaattcttgtctttcacctagaggaccatcaactctttaggctccttcaagattggttttgaaacatgttggcatctatgtcaagtgtggaggtggctaatgtatgaggaagatgtaactggagggaagttcctctgcagagtgaacattcactgtataaatacatcctgtttttccttgggctaccaaacaagtctttcccttatcaaaattcacaccgaagtatgtgtttacccagactaaaaatcagaatcattatttccaatcagttatagcaaataggtctggagttcggtaatcatttttacaactgcaaatgaactttcttgcttgtaataaaagagagaaaacatccattacttagttaccttggtagacttggattaatatattatttggggcacaaaattttcaccagctggagatctattttcttcttttaagtttgag

SEQ ID NO: 9 - DNA, 1230 bp, Homo sapiens
aaagacttccggtcggcgtgagcgtgaggtgtgggtgttcgtttctcaggtaaaacatggctaaaagcttacggagtaagtggaaaagaaagatgcgtgctgaaaagagaaaaaagaatgccccaaaggaggccagcaggcttaaaagtattctcaaactagacggtgatgttttaatgaaagatgttcaagagatagcaactgtggtggtacccaaacccaaacattgccaagagaaaatgcaatgtgaggtaaaagatgaaaaagatgacatgaaaatggagactgatattaagagaaacaaaaagactcttctagaccagcatggacagtacccaatatggatgaaccaaaggcaaagaaaaaggctgaaggcaaagcgagagaaaagaaaggggaaaagcaaagcaaaagcagtgaaagtggcaaagggtttggcctggtagactcttaaaaccttggaaaatgccacatgggatagatgacggattagaatgtatacacatgtatactttgatttcaactgccaccaaatgaaaaccatttgttttcctattttaacttggccttttttcttcaattcaaacccagcataactcctcaagtttgttttgggaacttgaataaaatattttctttgatacatccaagctctactgatactttaactggatgctacccaatatccagttataatcaggcctcaacgttctgtcaggtattaatatggttagaattgttcttacaactggtaattatagtcaatagagataaaacagatgatgtactgacaaatttttgtgaacttagattttaaagaaagttgttgtataatcatatcatttaaaaatactacattagggctgggcatggtggctcacacctgtaatcccagcactttgggaggccgaggcaggtggatcacgaggtcagttcgagactagcctggctaatacagtgaaaccccatctctactaaaaatacaaaattagccgggcatgggggcgcgcacctgtagttccagctactcgggaggctgaggcaggataattgcttgaacccaggagatggaggttgcagtgagccaagattgccccactgcactccaccctgggcaatggagtaggactctgtctcaaaaaaaaaaaaaataatattaatggatcttataaagtacttgtgtggagctttgattccacagaataaaagatattttgtgtgtagatcttc

SEQ ID NO: 10 - DNA, 2065 bp, Homo sapiens
aacagcaatggcggaaggagaagatgtgccgccgctgccaacgtcgagcggcgacggctgggaaaaagatcttgaagaagctctggaagcaggaggttgtgatcttgaaacgttgagaaatataattcaaggaagaccgctgcctgctgatctgagggccaaagtttggaagattgctctgaatgttgcaggaaaaggtgattgtttggcatcatgggatggtattttagacttgccagaacagaacactattcacaaagattgcctgcagtttattgaccagctttcagtgccagaggagaaggcagcagaattacttttggatattgaatctgtaattaccttttattgtaaatcacgtaacattaaatatagcacatcccttagctggatacatctactgaaaccattggtgcatcttcaactgccacgcagcgatttatacaactgcttttatgccataatgaataagtacattcccagggattgttcccagaaagggagaccatttcatcccttcaggttgctcatccaataccatgagcctgagctttgttcttatcttgatacaaagaaaattactccagactcctatgcactcaactggcttggaagtctttttgcatgttactgttccactgaagtcactcaggcaatatgggatggatatctacaacaagcagatccattttttatttatttcttaatgttaattatccttgttaatgcaaaagaagttattttaacacaagagtcagacagcaaagaagaagttatcaagttcttggaaaatactccatccagtctgaatatagaagatatagaagaccttttctctctggctcagtattattgcagcaaaacaccggcttcttttaggaaggataatcaccatctctttggtagtactttgttgggaattaaggatgatgatgcagatctgagtcaggctctttgtctggccatctccgtgtcagagatccttcaagcgaatcagctacaaggggaaggagtccggttctttgtggtggattgccgtcctgcagaacaatataatgctgggcatttatcaactgctttccactcagattcagacctgatgcttcagaatccatctgagtttgcacagtcagtaaaatccttgctggaagcacagaagcagtccattgagtctggctccatagctggtggggagcacctctgttttatgggcagtggcagggaggaagaagacatgtatatgaacatggtcctggcacactttttacagaaaaacaaagaatatgtgagtattgccagtggaggatttatggcactgcagcagcacctggcagacattaatgtggatggaccagaaaatggatatggccattggattgctagtacctcaggctcaaggagcagtatcaattctgttgatggtgaatctcctaatggctcaagtgatagaggaatgaaatcactagtaaataaaatgactgtggctttgaagacaaaatccgttaatgtcagggaaaaagttatcagttttatagagaatacatcaactcctgtggatcggcatgtgagcagcagtgacagagtgggcaagccttaccgtggcgtaaagcctgttttcagcattggggatgaagaagaatacgacacagatgaaattgacagttcttcaatgtcagatgatgatagaaaagaggttgtaaacattcagacttggataaacaaaccagatgtcaaacatcattttccttgtaaagaagtaaaagaaagtggacacatgtttcccagtcatctgttggttactgcaacacatatgtactgtttaagggagattgtttcacggaaaggattggcttatatacagtctcgacaagcgctgaattctgtagttaaaattacatccaaaaaaaaacatcctgaactcattaccttcaagtatggaaatagcagtgcttcaggaatagaaatcttggcaatcgaaaggtatttgattccaaatgcaggggatgcaactaaagccataaaacagcagatcatgaaagttttggatgctttggaaagttaatat

SEQ ID NO: 11 - DNA, 3221 bp, Homo sapiens
tgtcaaaagcctgcacacgagacccccgtgggccaggactgacttcctccccacacagggctgggcggggcaagcaggaaggagcctgttacagtcaaggtgacgcatccttgccgggccagcccgaacagcagctgggtcggcaagcgacaggagcacgggtcatcttttccccagaggcgtcggaatggacctgtgccacccagagcccgcggagctgagcagcggggagacggaagagttacagaggatcaagtggcaccgaaagcagctcctggaggacatccagaagctgaaggatgagattgcagatgtgtttgcccaaatcgactgcttcgagagtgcggaggagagccggatggcccagaaggagaaggagctgtgtattgggcgcaagaagttcaacatggaccccgccaagggtatccagtatttcattgagcacaagctgctgacccctgacgtccaggacattgcacggttcctgtataaaggcgagggcctcaacaagacagccattggtacctacctgggggagagggatcccatcaacctgcaggtcctccaggccttcgtggactgccacgagttcgccaacctcaacctcgtccaggccctcaggcagttcctgtggagcttccggctgccgggcgaggcccagaagatagaccggatgatggaggcctttgccactcgatactgcctctgcaacccaggcgtcttccagtccacagacacctgctacgtgttgtccttctccatcatcatgctcaacaccagcctccacaatcccaacgtccgggacaggccgcctttcgagcgctttgtgtccatgaaccgcggcatcaacaatggtagcgacctgcccgaggaccagctgcggaacctcttcgacagcatcaagagtgagccattctccatccctgaggacgacggcaatgacctcactcacaccttcttcaatccagaccgggagggttggctgctcaagctagggggccgcgtgaagacgtggaaacggcgctggttcatcctgaccgacaactgcctctactacttcgagttcaccactgacaaggagccacggggaattatacctcttgagaacctctcggtgcagaaggtggatgaccccaagaagccattctgcctggagctctacaaccctagctgccgaggccagaaaatcaaggcctgcaagaccgatggcgacggcagggtggtggagggcaagcacgaatcgtaccgcatctcagccaccagtgccgaggaacgtgaccagtggatcgagtccatccgagccagcatcacccgtgtccccttctacgacctggtctctactcggaagaagaagattgccagcaagcagtgagattcctggaggtggcactgggggctggtcaccctgagagtcccatcgcctgcagcacctggagacccacctcccaccccagtgcactcttttgggccacagacatcattgctgttccccgttacctcgagctgactctagaggggaaggcagagctcaggagggtgggtgggagctgcagtgggctcagagtccagcaatgaggccccctggcctgggcacccagctgcaggcccctgccctacgtgcactacaggaaggggtgaggagagcagccagaggaaaaccagccccagaatgctgcaacttctcttctctctggacttcggtgtcctcggctctgaaggcgctctctgcacttagatgctgtcagccctcaacgtaggaggggccgtggggtccctaagtgattcttctccctggcaaggctcttccttttcagggatatctctgccaacccttcccctgtcctcgggttgggcttggccctctctgcctgagagagctcagcacacacacagctcagacccacggacaggaccccgggacagaaccccgggagcactgccctaggagcctggaccccacgagctcagtcccagctctgcctctgactcgctgtgtaccctctgccaagtcatgcccattctctagttcttgcaaaactgcagtgtttggactagaaacgtattggcccctgctagccctgtgctccagcttccagctggagatggcagccgttatttgcggagcccaggctgactccggattcaacgttgctggggagagaaaagcagtatagactccaccttccaggatgtccatttcggggagaggagcaggtgggaccctcaagaaaatgacggagaacatcccagacagatgggactcaagcaggatgggtgctatatccaagaagccaagaagggagagtttcgtgcactgtggttaacaggagggccgcctggaggcagtggctgagccagaaagtaacacagagctcatgcttggagagatagagtcttggccatggctttcctgcaagaccactgacgagcagtcccatggtgataaagggcagcccggcgggtcccagcatctcgagaccctctgcagaagtattatcagagtagagctgacttccagtacccgggcagccagctctgtctccagggaggcctggcctggaggaggagtccactaacaggaaacacttctcaccccctcacacaggcccaggggagcccctggagggaaattccttggcaggggaacaggaaatgtggtcgcctctgccccactgccagcctgagtgggcaaggaagcaggtggatcccccagaaggaaccgcagctcgcgaggcacctctcctcgtccccacccacccccacatttgcacaccttccacagggtcaggatggagtagctgccttgcgaggtggtgagactcctgtctctggaggtctgcaagcactggtagtgatattgcagcagacaaggtctgggttgggcgtctgcaggaggagaccttgtgggacatctgaggacatccgcagattcttgtcagcctgtgaactaggccctgcctctgtcacctcattggtccatgaaggagcagccaggggtggtggaaggagcactgggctaggggtcaggggtcagagattctgtcctgctcctgggatgcactggctactcccttagtctactcccttcccctctctggtcctcagcttcctccatcatggaggagatgggatcatggattttctgggcataagtggctgttctgggagtcattccaaagagagaataaaactcctgatccaaaaaaaaaaaaaaaaaaaaa

SEQ ID NO: 12 - DNA, 1336 bp, Homo sapiens
ggggcttgcagagccggcgccggaggagacgcacgcagctgactttgtcttctccgcacgactgttacagaggtctccagagccttctctctcctgtgcaaaatggcaactcttaaggaaaaactcattgcaccagttgcggaagaagaggcaacagttccaaacaataagatcactgtagtgggtgttggacaagttggtatggcgtgtgctatcagcattctgggaaagtctctggctgatgaacttgctcttgtggatgttttggaagataagcttaaaggagaaatgatggatctgcagcatgggagcttatttcttcagacacctaaaattgtggcagataaagattattctgtgaccgccaattctaagattgtagtggtaactgcaggagtccgtcagcaagaaggggagagtcggctcaatctggtgcagagaaatgttaatgtcttcaaattcattattcctcagatcgtcaagtacagtcctgattgcatcataattgtggtttccaacccagtggacattcttacgtatgttacctggaaactaagtggattacccaaacaccgcgtgattggaagtggatgtaatctggattctgctagatttcgctaccttatggctgaaaaacttggcattcatcccagcagctgccatggatggattttgggggaacatggcgactcaagtgtggctgtgtggagtggtgtgaatgtggcaggtgtttctctccaggaattgaatccagaaatgggaactgacaatgatagtgaaaattggaaggaagtgcataagatggtggttgaaagtgcctatgaagtcatcaagctaaaaggatataccaactgggctattggattaagtgtggctgatcttattgaatccatgttgaaaaatctatccaggattcatcccgtgtcaacaatggtaaaggggatgtatggcattgagaatgaagtcttcctgagccttccatgtatcctcaatgcccggggattaaccagcgttatcaaccagaagctaaaggatgatgaggttgctcagctcaagaaaagtgcagataccctgtgggacatccagaaggacctaaaagacctgtgactagtgagctctaggctgtagaaatttaaaaactacaatgtgattaactcgagcctttagttttcatccatgtacatggatcacagtttgctttgatcttcttcaatatgtgaatttgggctcacagaatcaaagcctatgcttggtttaatgcttgcaatctgagctcttgaacaaataaaattaactattgtagtgcgaaaaaaaaaaaaaaaaaaaaaaaaaaaaa

SEQ ID NO: 13 - DNA, 479 bp, Homo sapiens
agattccgtcgcttcttccggagccgtacgtggcaccgccccgcctcgcgggcgaccgcggggcttgctgggaagagaggcgaagccaggtcacctttcaaggacccagaagtagggttttggcctaggtaacggggcagagatgtggttcgagattctccccggactctccgtcatgggcgtgtgcttgttgattccaggactggctactgcgtacatccacaggttcactaacgggggcaaggaaaaaagggttgctcattttgggtatcactggagtctgatggaaagagataggcgcatctctggagttgatcgttactatgtgtcaaagggtttggagaacattgattaaggaagcattttcctgattgatgaaaaaaataactcagttatggccatctacccctgctagaaggttacagtgtattatgtagcatgcaaatgtgtttatgtagtggcttaataaaaataaaatg

SEQ ID NO: 14 - DNA, 6404 bp, Homo sapiens
ttacatcttatagcacccagtgaattatgatatggggctgcggtttatttgctctggcgacaatatggcttacttgccgtggaatatcccggtatttcagaagtaacatattatttttaaagagggagctttgctttctctaaatcacatggtgcaaagttgggaatacagtggcctgtaaattacaaatattatttacaaactagaaggaaagctgacatgtgtttgtgcctgtgtgacagtttcactaaggaattccaaaactgtggatagcctgttacttgagaaaaatacacggtggcagtcttgcagatgtttttcccgcctgttagccctccaggttcaaaaactgtttggtgcattttaaggcggcagtctcaccagatcgcaggattctagtctaattggcttctaaccttcaatctaaccttgccggcttccttgcaaagcccggtgcaagggcctctttcaaaatgaacccactggtgtgcctagcagtcggtagaagaagcgggagggcgtccggtctgcacgcccgccgcgaggttacaatgctgaacgcatgagatggaagataccaacgggaggccgaggggatccacggcgcccgcgcgggctccggcttcctcctgctctcggcgccgctgggcgaccgcccatgacccgctcttgcgggctctgtccggttgacaggcgaccctgtggcccggggaagcgcgggagggcgccggcggaaagttgaagagcgtttttctcgccgccgcgtgcattaggagctcgacgagtccgccctgggcttcctggtggggctgggcgggcgggggaggggccgcgcagcagcagcggaagccagacctcggcgataagaggctgcacagcgacatgcaacagtcttttcactgcagctgaatgagttgtggcgcccacaatgctcccatgacaaggagctgacaagttccattttccgtcgcgggcatcttggaatcatgactcccacaatgccttgggcacttggtcgacagtggggccgcctctgaaaaaaaaatgtgagaggttggtactaagaagtgcctttcctgacgtctctgctgcttggaaccgcttctagagcagtctctgcttttgccttgcttgctgccagctagactgtgacgacagcacatccaccctccacctctagcccagacacccccatttctacttataatcaagagaaaagctctaagtatctggcattgccctaggctgctttagtgttaaaagaaaagtttgctgaaaaagtaagatatcttctgccaggaaatcaaggaggaaaaaaaaaatcattttctcgattttgctctaaactgctgcatctgtctatgccaaactaatcaataccgattgcaccaccaaactccattgcaaattcagctgtgaggagattccctttcagacaactttgctgaaagcagcttggaaattcggtgtcgaagggtctgccacgttttcatgcttgcattttgggctccaaattggcactgggaaggggttactgagagcacaaggctgataccaggccctacttttaaacgttcatctacttacaatcctagtatttctctaaaaaccaaaacctctttgaattaacagtttcatgctgtgaatttctagtgggagatcttttccttgatattgacgacacaattttccatgtacttttaaagcagggagtggggaaaagtattttgaggggacattttcatcatcagttcagctttttttttttggttgttgctcttttttgggggggttgggtttgttggtttcactgaaacatttaactacctgtaaaatctaaacatggctgttagtgtcacaccaattcgggacacaaaatggctaacactggaagtatgtagagagttccagagggggacttgctcacggccagacacggaatgtaaatttgcacatccttcgaaaagctgccaagttgaaaatggacgagtaatcgcctgctttgattcattgaaaggccgttgctccagggagaactgcaaatatcttcatccacccccacatttaaaaacgcagttggagataaatggacgcaataacttgattcagcagaagaacatggccatgttggcccagcaaatgcaactagccaatgccatgatgcctggtgccccattacaacccgtgccaatgttttcagttgcaccaagcttagccaccaatgcatcagcagccgcctttaatccctatctgggacctgtttctccaagcctggtcccggcagagatcttgccgactgcaccaatgttggttacagggaatccgggtgtccctgtacctgcagctgctgcagctgctgcacagaaattaatgcgaacagacagacttgaggtatgtcgagagtaccaacgtggcaattgcaaccgaggagaaaatgattgtcggtttgctcatcctgctgacagcacaatgattgacaccaatgacaacacagtcactgtgtgtatggattacatcaaagggagatgctctcgggaaaagtgcaaatactttcatccccctgcacatttgcaagccaagatcaaggctgcccaataccaggtcaaccaggctgcagctgcacaggctgcagccaccgcagctgccatgggaattcctcaagctgtacttcccccattaccaaagaggcctgctcttgaaaaaaccaacggtgccaccgcagtctttaacactggtattttccaataccaacaggctctagccaacatgcagttacaacagcatacagcatttctcccaccaggctcaatattgtgcatgacacccgctacaagtgttgttcccatggtgcacggtgctacgccagccactgtgtccgcagcaacaacatctgccacaagtgttcccttcgctgcaacagccacagccaaccagatacccataatatctgccgaacatctgactagccacaagtatgttacccagatgtagaattttcatcactaaacaatcatgctaaagaggaaaggacagtgtgcttggttagagtaaaggacgaggtcattagccatattgtatatatcgtcaagcaacacacacaaaagttcctcagccacaagacatccacatattgcatgttaaccagaagaaaagacaacattttccggaaatccactgcacactgttgcctatacactttgtacatttaattgatatttgtgctgaggtgatattcctgtctaaaagaacaacattgtctttcttttctagcacagagttatgcattcaaagatgcatacctagttagtttcctatatattcatgccatcttgaaaagacagactatggtgtaaccatgattctattatgtattggtacgtctgtagaccaagatataattttttaaaaataagtttatttctttcaaggtttacaaataacaaaggtgcaccttgtatttaaaattgccattatagatgagagcgtgcatgcacagtcatttttgtttaagagtaatatttttaatgtaatagattgtaagacgtggtgagggagggatctgacagagatgaatgtgccaagcaaaaccacaactgtgtatattttaaagcacatcatggctttaagtaccatgttgttaaggattctcatgaagtgccatagactgtacatcaaattagagtattatttcttcagtgttattgttttcagagccacattttgttgcatatttgctagtactaatcagtcaaagggcaccattctttttttttttttttgaaaccaaagctgtctcagaaatggccaatttaactttacagtaacaatagacagcacaacacaaactctctcaatacagataaactcacacatactggagatatatatataatagatatatataaaattattttaatgcattgtagtgtaatatttatgcatactatactgtataacatgttattcaaaagggattgccatttctgagacacagtaacaaaaaaatgaggaaattattttgcttctatttatagcctctgtcaaaagtcaaaagactataaatgctttgcaaaaatggtttcacgtttgcttaaatgcttcatcacagtcacattcaaaatagtgactctaaacaaagaagaaagcagcactgtcatcagatgcatgataaaccaaaatatgaaaatgggaaatgtttaattaacctagtaattgggtgggttaagtacatgggtgaattttatatgtgatttttgttttgttttgttttgttcagattaactgcttatagccttagaaagccttttacaaaattaaaaaaaaaatagatgtgcattcagtttttaagaatggaatcatccaaaggaattcctttttttgaggtttggatgttgcagctagtaaaggatatttttgctctgttcagcagttctaaaaattgctgaagtaggggccaggtcactggtagttatagtatggaatgggagaagtgaaagttcagttatagaactttccatacttccaagtttactgcaagtttttatgcttgagagagatgctttctaatataagactgatgtgttgattttactgattgtactgtacatctattaaagccttagattattacattacgggttggaacccataccaatgtaatttcaatcgtgttaagaaagtaatggtgacttcacatgttattgtagttagttacattatagaatattacttatttttcttgttaaaatgtagtttttcatttcctacatttattagattttcattttctattaacaattgaataccatttcagtttatagacttgttttattagattttaccaatgaatttttcaaaatacaaaaaaaagtagtttttccttcataacatactcagttttgaattacatgtagtgtcacatgaatattcgtattgttaactaaatgatttatattttactgatttaatattacagtgtaagaatgtcagtcattgttagttcttgtctagttttcattaaaagaacaaagatcttttatatggatatcttataaatatataatcattgctaagtaagaagttaagttgttgctatcgcaacaatcctggcagacaattgagtaatattttgatgatttattttgtttgtaattagttattataagaagatctagatcctagatattagaataaaatttattttctactgtatccatttcaaatgttaaaatattgtttaatatttttgaaatccctgagtatcaggccttgttataaataagctgcataatcaataaatagaacaagggactttttgttgataatccaaatactcaaagtttacgtaatgaaaattatagcgtgtgtgcaaactcttgagggttgattatgctgcaatttagcatgttggaacgtctagggagaaggttgactttttgcacttctgtatatagtcaaaagagagaaacctgtataatagtaagatcttattttgaataaaaacgtctataattacaaggagttttgttaaggctaatacaatgacagactgagcaaaattgcttgcaaaagtggcacagagttagcactccataccccttcaaacatgttgctttgctttcttgtggacagcttgtagtttgccaggattttttcagctggaaagatacgccatcctttcaaaccctcatgactgacaaaaactccatggggccaaatctgcctgaagatcattaccaaaaatagcaggtacttctaccattaaggtgaaatcatggatcagatattccttacatttttcaaaactactgcatgtttaaaacttcaacaaaaaaagagagaaagaactatactaagaacatatattattcagatcagtttctgccaatttcagtggtttattgttcacaaaaaaatcttcaaaacaagtattgactttcacaaaatttaaatcataaacaggcaaaccaaacagcacactgtagctatagttgttatgtgattgttttttaattgctgtaggatcctgttctttcagcaggtgaaaaataaaacgcagttcaaatttcatggttttaattttcaactcagaagcactcaaaaatgcaaaatgtgataatgggcacttgtttaaaagaattagtgtatccagccttcactccagctggttaaaaatgttgcacttatcagcaaccctaccactttcatctgctgaaaggacaaatgtgcttggttttactattatgtaatcacaacttactttctgcttgtagttgcttaaaattatgtattttgtcttgggctgcaatttgttttatgcttattttattattactgcagtagttgactttgctgtatggaaaaataaagtgaaattgccctaataaaacttctctttcttaagt

SEQ ID NO: 15 - DNA, 4968 bp, Homo sapiens
gcggccgccgtggccctcacagtcggcgtttcgccgcctgcccgcggtgcccgcgcacgccggccgccatcgccttcgcgcctggctggcgggggcgctgtcctcccaggccgtccgcgccgctccctggagctcggcggagcgcggcagccagggccggcggaggcgcgaggagccgggcgccaccgccgccgccgccgccgccgccgcgggggccatgaccgtggagcagaacgtgctgcagcagagcgcggcgcagaagcaccagcagacgtttttgaatcaactgagagaaattacggggattaatgacacccagatactacagcaagccttgaaggatagtaatggaaacttggaattagcagtggctttccttactgcgaagaatgctaagacccctcagcaggaggagacaacttactaccaaacagcacttcctggcaatgatagatacatcagtgtgggaagccaagcagatacaaatgtgattgatctcactggagatgataaagatgatcttcagagagcaattgccttgagtttggccgaatcaaacagggcattcagggagactggaataactgatgaggaacaagccattagcagagttcttgaagccagcatagcagagaataaagcatgtttgaagaggacacctacagaagtttggagggattctcgaaacccttatgatagaaaaagacaggacaaagctcccgttgggctaaagaatgttggcaatacttgttggtttagtgctgttattcagtcattatttaatcttttggaatttagaagattagttctgaattacaagcctccatcaaatgctcaagatttaccccgaaaccaaaaggaacatcggaatttgccttttatgcgtgagctgaggtatctatttgcacttcttgttggtaccaaaaggaagtatgttgatccatcaagagcagttgaaattcttaaggatgctttcaaatcaaatgactcacagcagcaagatgtgagtgagtttacacacaaattattagattggttagaagatgccttccaaatgaaagctgaagaggagacggatgaagagaagccaaagaaccccatggtagagttgttctatggcagattcctggctgtgggagtacttgaaggtaaaaaatttgaaaacactgaaatgtttggtcagtacccacttcaggtcaatgggttcaaagatctgcatgagtgcctagaagctgcaatgattgaaggagaaattgagtctttacattcagagaattcaggaaaatcaggccaagagcattggtttactgaattaccacctgtgttaacatttgaattgtcaagatttgaatttaatcaggcattgggaagaccagaaaaaattcacaacaaattagaatttccccaagttttatatttggacagatacatgcacagaaacagagaaataacaagaattaagagggaagagatcaagagactgaaagattacctcacggtattacaacaaaggctagaaagatatttaagctatggttccggtcccaaacgattccccttggtagatgttcttcagtatgcattggaatttgcctcaagtaaacctgtttgcacttctcctgttgacgatattgacgctagttccccacctagtggttccataccatcacagacattaccaagcacaacagaacaacagggagccctatcttcagaactgccaagcacatcaccttcatcagttgctgccatttcatcgagatcagtaatacacaaaccatttactcagtcccggatacctccagatttgcccatgcatccggcaccaaggcacataacggaggaagaactttctgtgctggaaagttgtttacatcgctggaggacagaaatagaaaatgacaccagagatttgcaggaaagcatatccagaatccatcgaacaattgaattaatgtactctgacaaatctatgatacaagttccttatcgattacatgccgttttagttcacgaaggccaagctaatgctgggcactactgggcatatatttttgatcatcgtgaaagcagatggatgaagtacaatgatattgctgtgacaaaatcatcatgggaagagctagtgagggactcttttggtggttatagaaatgccagtgcatactgtttaatgtacataaatgataaggcacagttcctaatacaagaggagtttaataaagaaactgggcagccccttgttggtatagaaacattaccaccggatttgagagattttgttgaggaagacaaccaacgatttgaaaaagaactagaagaatgggatgcacaacttgcccagaaagctttgcaggaaaagcttttagcgtctcagaaattgagagagtcagagacttctgtgacaacagcacaagcagcaggagacccagaatatctagagcagccatcaagaagtgatttctcaaagcacttgaaagaagaaactattcaaataattaccaaggcatcacatgagcatgaagataaaagtcctgaaacagttttgcagtcggcaattaagttggaatatgcaaggttggttaagttggcccaagaagacaccccaccagaaaccgattatcgtttacatcatgtagtggtctactttatccagaaccaggcaccaaagaaaattattgagaaaacattactagaacaatttggagatagaaatttgagttttgatgaaaggtgtcacaacataatgaaagttgctcaagccaaactggaaatgataaaacctgaagaagtaaacttggaggaatatgaggagtggcatcaggattataggaaattcagggaaacaactatgtatctcataattgggctagaaaattttcaaagagaaagttatatagattccttgctgttcctcatctgtgcttatcagaataacaaagaactcttgtctaaaggcttatacagaggacatgatgaagaattgatatcacattatagaagagaatgtttgctaaaattaaatgagcaagccgcagaactcttcgaatctggagaggatcgagaagtaaacaatggtttgattatcatgaatgagtttattgtcccatttttgccattattactggtggatgaaatggaagaaaaggatatactagctgtagaagatatgagaaatcgatggtgttcctaccttggtcaagaaatggaaccacacctccaagaaaagctgacagattttttgccaaaactgcttgattgttctatggagattaaaagtttccatgagccaccgaagttaccttcatattccacgcatgaactctgtgagcgatttgcccgaatcatgttgtccctcagtcgaactcctgctgatggaagataaactgcacactttccctgaacacactgtataaactctttttagttcttaacccttgccttcctgtcacagggtttgcttgttgctgctatagtttttaacttttttttattttaataactgcaaaagacaaaatgactatacagactttagtcagactgcagacaataaagctgaaaatcgcatggcgctcagacattttaaccggaactgatgtataatcacaaatctaattgattttattatggcaaaactatgcttttgccaccttcctgttgcagtattactttgcttttatcttttctttctcaacagctttccattcagtctggatccttccatgactacagccatttaagtgttcagcactgtgtacgatacataatatttggtagcttgtaaatgaaataaagaataaagttttatttatggctacctatgtgtttgtaagcaggtatattgtatattagtgtattagtaatactagataaatgaattttgtctggggattaagattggatagttaatagattaatacaatcttttaattctgctctaatgctagcaaattggaaaatgtttaagtctttgacacttaaatttatctatatttttaacaaagttcttgaacttagtatggcaccggaacctgttttgaattcagtcaggtttttactcaagtaagtggttgattttttttaagtcaaactacactgaaacttttatccttttcttagattaatcttactttttaaatgtatttacaatatacagcaaggtgattatttcaagagaatcccaaagtacttgaataagggctattgtaaaatttaaaagaaatatttatatatacacatatatacacatacacacatgtatatatatattcttcataatggaggacaatgttttgcaatatataaatcattctatttttgtaaattgtatatcactttaattgaaaatgttctctactaattaatactgtgaaacaaaattgatgttgtttaactagaagttatgagtatcttaactgcctttattccttttcaaaaaggaaaaagctgtagaacattttgtagatgaaactactgtttaagattaatgaattaatattgtgaatgaaaatcaaaatccatactttaaaggtaatcatgttactaacaacctatttttgaattcataaaaatttctttataaatgatgttttgtgaacatagtaaaatagaccattatactatgtgtatgtttgatacagcgtcgccaaaactagtgttctttattagtgcctctcacaaaagatcctggatggaggagtaagatgaaatattatgctattatatgatgctgtttgtaaaggtattaatgtactagtaaggtgttaatgacaaggaattagtactattcctgttgtaaagttagattttgcatattgtatctatcaaaatatgtttgggtttagattttaagttgtctactgagcagatttctgcattggttttccagtcctgttaaaagtttagaaacttcatatgtgtcatcacagcttttgtaaagaaagtatccttaatattttatgacattct

SEQ ID NO: 16 - DNA, 3282 bp, Homo sapiens
atgagttggttcaacgcctcccagctctccagcttcgctaagcaggccctgtcccaggcccagaagtctattgacagggttctggacatccaggaagaggagccgagcatctgggccgagaccattccgtatggagagccgggaataagttcccctgtcagtggaggatgggatacttcaacctgggggttgaaatcaaacactgaacctcagagtccaccaatagcctctcctaaagcaatcacaaagccagttcggaggactgtggtcgatgaatctgaaaatttcttcagtgcctttctctcgccaaccgatgtccagaccattcagaagagtccagtggtatcaaaacctccagcaaaatcacaacgaccagaagaagaagtgaaaagcagcttacatgaatccttgcacattggccagtcaagaactcctgaaacaactgaatcacaagtaaaagactcttctttgtgtgtttcaggggaaactctggcagcaggtacttcatcacctaaaactgaaggcaagcacgaagaaactgttaataaagaatcggatatgaaggtgccaactgtaagtttgaaagtatctgaaagtgtaattgatgtgaaaacaactatggaaagtatatctaatacgtctacgcagtctctcacagcagaaacaaaggacatagctttggaacctaaggaacaaaaacatgaagacaggcagagcaatacaccttctcctcctgttagtaccttttcatcaggtacttctaccaccagtgatattgaagttttagatcatgaaagtgtaataagtgagagctcagcgagctcgagacaagagactacagattcaaaatcaagtcttcacttgatgcagacatcttttcagcttctctctgcatctgcttgtcctgaatataatcgtttagatgatttccaaaaactcactgagagttgctgttcatctgatgcttttgaaagaatagactcatttagtgtacagtcattagatagccggagtgtaagtgaaatcaattcagatgatgaattgtcaggcaagggatatgctttagtgcctattatagttaattcttcaactccaaagtctaaaacagttgaatctgctgaaggaaaatctgaagaagtaaatgaaacattagttatacccactgaggaagcagaaatggaagaaagtggacgaagtgcaactcctgttaactgtgaacagcctgatatcttggtttcttctacaccaataaatgaaggacagactgtgttagacaaggtggctgagcagtgtgaacctgctgaaagtcagccagaagcactttctgagaaggaagatgtttgcaagacagttgaatttctgaatgaaaagctggaaaaaagggaggctcagttattatctcttagtaaggaaaaagcacttctagaagaagcttttgataacctgaaagatgaaatgttcagagtgaaagaagaaagcagtagcatttcttccttgaaagatgagtttactcaaagaattgcagaagcagaaaagaaagttcaactagcctgcaaagagagagatgctgctaaaaaggaaatcaaaaacataaaagaagaacttgccactagattaaatagtagtgaaactgcagaccttttgaaagagaaagatgagcagatccgagggttaatggaagaaggagaaaaactttcaaaacagcagctgcacaattctaacatcatcaagaaattaagagctaaagacaaggagaatgaaaatatggttgcaaagctgaacaaaaaagttaaagagctagaagaggagttgcagcatttgaaacaggtccttgatggcaaagaagaggttgagaaacaacatagagaaaatattaaaaaactaaattccatggtagaacgccaagagaaagatcttggccgtcttcaggtagacatggatgaacttgaagaaaagaaccgaagtattcaggctgccctggatagtgcatacaaagaacttactgatcttcacaaagccaatgctgcaaaggatagtgaggcacaggaagctgctctgagccgtgaaatgaaagctaaagaagaactttctgcagcattagagaaggcccaagaagaagcccgtcagcagcaagaaacattagccattcaagtgggggaccttaggcttgcattgcagcgtacagaacaagcggctgccagaaaggaggattatttacgccatgagatcggtgaacttcagcagagactccaggaagcagagaatcgaaaccaggaactgagtcaaagtgtttcatcaacaacaagaccattgcttcgacaaatagaaaatttgcaagcaaccctgggatcccagacatcgtcgtgggagaaattagagaagaatctttctgataggcttggtgaatcccagaccttgctggcagcagcagttgagagagaacgtgcagctacagaagaactccttgctaacaaaattcagatgtcttccatggagtcacagaattctcttttaagacaggaaaacagtagatttcaagcccagctagaatcagagaaaaataggctgtgtaaactggaggatgagaacaataggtaccaggttgaattggaaaacctaaaagatgaatatgtaagaacacttgaagagacgaggaaagaaaagacattgttgaatagtcagttagaaatggaaagaatgaaagttgaacaagaaaggaagaaagccatttttactcaagaaacaataaaagaaaaggaacgcaagccattttctgtttctagcactcccaccatgtcacgctcaagttcaataagtggtgttgatatggcaggactacagacatcttttctgtctcaggatgagtctcatgatcactcatttggaccaatgcctatatcagccaaatggaagcatctttatgctgcctgtaaggatgggagcaggatcaagcatattgaaaacctacagtctcagctaaagctaagggaaggggaaatcactcatttacagctagaaattggcaatctagaaaaaactcgatcaataatggctgaagaactagttaaattaacaaatcaaaatgatgaacttgaagagaaggtgaaggagatacccaaacttagaactcagctaagagatttggatcaaaggtacaacactattctgcagatgtatggagaaaaagcagaagaggcagaagaacttcgattagatctcgaagatgtaaaaaatatgtacaaaactcaaatagatgaacttttaagacaaagtctcagttaa

SEQ ID NO: 17 - DNA, 4357 bp, Homo sapiens
atagtcaccagaagctggaagagtcaaaggacacattctcccctcaagccccagtgggagcacggcccagctggattttggacttctggcctccagaactagacagggcctcactgtgtcacccagggtggaatacagtggtgtgatcatagctcactgcagcctggaattcctgggctcaagcaaccctgccacctcagccttccaagtagctaggactacagaacatccatgatagcagtcttctgtaaatcgaacttttcaagaattctctgaaggaaccaagtaggatattcttacatcatgacttaatgtgaatgcaagaacaagaaataggttttatctctaaatataatgaagggctgtgtgtaaacactgaccctgtctcaattctaacaagcattttagacatgagtttacatcggcaaatgggttcagatcgagatcttcagtcctctgcttcatctgtgagcttgccttcagtcaaaaaggcacccaaaaaaagaagaatttcaataggctccctgtttcggaggaaaaaagataacaaacgtaaatcaagggagctaaatggcggggtggatggaattgcaagtattgaaagtatacattctgaaatgtgtactgataagaactccattttctctacaaatacctcttctgacaatggattaacttccatcagcaaacaaattggagacttcatagagtgccctttgtgccttttgcggcattctaaagacagatttcctgatataatgacttgtcatcacagatcttgtgtggattgcttacgacaatatttaaggatagaaatctctgaaagcagagttaatattagttgcccagaatgtactgaacggtttaatccccatgatattcgcttgatattaagtgatgatgtcttgatggaaaaatacgaagaatttatgcttagacggtggcttgttgcagatcctgattgtaggtggtgtccagctccagactgtggatatgctgtgatagcatttggatgtgccagctgtccaaaattaacttgtgggcgagagggctgtggaacagagttttgctaccactgtaaacagatttggcaccccaaccagacctgtgatgctgctcgacaagagagagcccagagcttacgtttgagaactatacgttcttcatccattagttatagtcaagagtctggagcagcagctgatgatataaagccatgtccacgatgtgctgcttatataataaagatgaatgatgggagctgcaatcacatgacatgtgctgtttgtggttgtgagttttgttggttgtgtatgaaagaaatctcagatttgcattatctaagtccatcaggatgtactttttgggggaagaaaccctggagccgaaagaagaaaatattgtggcaactgggaacactggttggtgctcctgtcggaatcgctttaatagctggcattgctattcctgcaatgattattggcattcctgtgtatgtgggccgcaagattcacaatcgctatgaaggcaaggatgtttcaaagcacaaacggaatttggccatagcaggtggtgtaacgttgtctgtaatcgtgtctccagtagtagctgcagtgactgtaggtatcggtgttcctattatgttagcttatgtctatggcgtagttccaatttctctttgtcgaagcggaggttgtggagtctcagcaggcaatggaaaaggagttaggattgaatttgatgatgaaaatgatataaatgttggtggaactaacacagctgtagacacaacatcagtagcagaagcaagacacaacccaagcataggggagggaagtgttggtgggctgactggcagtttgagtgcaagtggaagccacatggatcgaataggagccatccgagacaacctgagtgaaacggccagcaccatggcactagctggagccagtataacggggagtctgtcaggaagtgccatggtaaactgttttaacaggttggaagtacaagcagatgtacagaaagaacggtacagtctaagtggagaatctggcacagtcagcttgggaacagttagtgataatgccagcaccaaagcaatggcaggatccattctgaattcctacatcccattggacaaagaaggcaacagtatggaggtgcaagtagatattgagtcaaagccatccaaattcaggcacaacagtggaagcagtagtgtggatgatggcagtgccacccgaagtcatgctggcggttcatccagtggcttgcctgaaggtaaatctagtgccaccaagtggtccaaagaagcaacagcagggaaaaaatcaaaaagtggtaaactgaggaaaaagggtaacatgaagataaatgagacgagagaggacatggatgcacagttgttagaacaacaaagcacgaactcaagtgaatttgaggctccatccctcagtgacagtatgccttctgtagcagattctcactctagtcatttttctgaatttagttgttctgacctagaaagcatgaaaacttcttgtagtcatggttccagtgattatcacacccgctttgctactgttaacattcttcctgaggtagaaaatgaccgtctggaaaattccccacatcagtgtagcatttctgtggttacccaaactgcttcctgttcagaagtttcacagttgaatcatattgctgaagaacatggtaacaatggaataaaacctaatgttgatttatattttggcgatgcactaaaagaaacaaataacaaccactcacatcagacaatggaattaaaagttgcaattcagactgaaatttaggcccataaatgctgcagaataattaccactgtacaaccgtgtttggagctggttgaactacatgtgactacttaagtttcaggttaccagcaaaagccgggtttcattatcataatgcagatacattttctgtgttcagcaaggcattgtgtgtcatgtggatcttagttaccaaactatgaagtgaaggctttaaaagtgcattattttaaggataataaatttgaagagcaaagcatgttttgtgtgtttgccacaaaacattgcttgaagcacatacttagatagaaattggtcttaatttatataatcaatataaaatactaatgcaattctacagcattcaaatgaagaaaacttgaggctttagggataagtggttagtgatattttattgaaaccactaaagagataagtttaaaagaactgcataggttactctcagtatatgatactctgtaacatttctatttatatcggcataaatttcattttttttcttcatatgcaatgtggttatataaagcttaatgcagctcatttgctaccatttggatacttagacactttgagcaagattgtggcagtttttgcacaactttgaaatagaaatacctggtactctatcttgtttattgttgatgccatcttagaggaaaaaatgtaaaggtaagtaattaagcatatgacagcaacaaataagatacataaaactacaaaataaagtcccattaggttataagtattacaaaaaatccacctttctctaaggggaagtttgtaccccattgattcttggtgcctttgggatcgactgggttttaatggcctagttatttgaggattttgctgtgttgttttccatgtcttctctggtcaccttggattatatataaaaatacaggaaatagataaacatgaatgtgattaataatgctgaaaaagtattagcctaccaaagacacactcaggctttagtgaataactttacataacctcagtttttaacacatgcatatcttctccaaccatgaaatcaaagcacggtgcagaacttgtaccaagtacaaaaggtccatgtatgattagcattattttcttttgcttttgtttatggacaatgttcagctgacataagcagaagttggccaaaatactgcctgtactgttaatttcctgtataattcacttaaataaaagcaggttaacctcaatgatagcagttaaaatgttctatcttatgtatttcttttaagtattaccattatggtgctactgagcgttttcttttggtaaaaagaaaaatgccatgggctgcagtcttcttccatcacttttccctaccaggtccattaatatgcttataacactagtgccagttattttatttgataatgcttatggtatttgtatatttgtttgcattccaattttgtttaataatgagtgtgtaaactgcatacgttaaataaatgtaaatactaatgtactgctgcaaaaaaaaaaaaaaaaaaaaaaaaaaa

SEQ ID NO: 18 - DNA, 1544 bp, Homo sapiens
gcgctcccggaacgcgcgcaccgcagacggcgcggatcgcagggagccggtccgccgccggaacgggagcctgggtgtgcgtgtggagtccggactcgtgggagacgatcgcgatgaacacggtgctgtcgcgggcgaactcactgttcgccttctcgctgagcgtgatggcggcgctcaccttcggctgcttcatcaccaccgccttcaaagacaggagcgtcccggtgcggctgcacgtctcgcggatcatgctaaaaaatgtagaagatttcactggacctagagaaagaagtgatctgggatttatcacatttgatataactgctgatctagagaatatatttgattggaatgttaagcagttgtttctttatttatcagcagaatattcaacaaaaaataatgctctgaaccaagttgtcctatgggacaagattgttttgagaggtgataatccgaagctgctgctgaaagatatgaaaacaaaatattttttctttgacgatggaaatggtctcaagggaaacaggaatgtcactttgaccctgtcttggaacgtcgtaccaaatgctggaattctacctcttgtgacaggatcaggacacgtatctgtcccatttccagatacatatgaaataacgaagagttattaaattattctgaatttgaaacaacatatttttatacttaatgaattgtatctcattaatctcttcccttacatcttcatgtattgttggtttgttttttggttttgggttttttttttttttttttggtataagaactaacatcaaaaggcctgtttaaagggaaaggttaatgggctacttaatattatgaacaaaacaaaaaaacaaggctgccacagtggaatattatcttacaagaataagaactacataaaacagatttgtaaaaaatacatatttgaagtattccctgtatttccattattctttatggaatataaagtaagcatgaaaggtagttaaaactttcaggtgcctgtagagtcataataactgtattttatgccttgcattcacgcaaattcacattggatgtgatttaaaagtagacattctctttttcctcttttaggatatgtttgattactggaaaattaatatggttatttgttagaagtctggtttataaaaaagccaaaagtgatggaatttattccatttgtcttaggaaggcccataatacttgtttttcttacatgtgactagcaactttctccacttaaagactaaatacctctttatatgatgtaaattattctaattcattttaaaatcttttaggtcagcaaaatgtgtgtcttcagtgctttctctaaaaacgttcctttatagctttgtacttttttttttagcgttgccattgaaagttaaaatgtttgcatggtttaccctctgagttatgtttcttctagtgagcatgcctgctgtcactaagtgaattatttactactttttgtaggtctatattttaataattattgggataataataaaaaaaaaaaaaaaaaa

SEQ ID NO: 19 - DNA, 2913 bp, Homo sapiens
gaatggctggggttggctgaagagcgcacagtggagttttaatgtccgccatgttggccatggcgtattgaagagagcgagcgagagaggagcggagcggcacagcctcccaccctcccggctggtgttagtgcccggacggcgggctctgcgctccgcccctcaagtccccggcagcggttggcgagtgggggccgaacccccggttctccatgatcccgctggccggggccgtttccccagagcggagaggtatctgctgcgcctgagatgagtaaactgtcgtttcgggcgcgggcgctagacgcctcgaagccgctgccggttttccgctgtgaggatctgcccgacctgcacgaatacgcctcgataaacagggccgtgccgcagatgcccaccggaatggagaaggaagaggagtcggaacatcatcttcagcgggctatttcagcacagcaggtgtatggcgagaagagggataatatggttataccggtcccagaggcagaaagtaatattgcttactatgagtctatatatcctggggaatttaagatgccaaagcagctcattcacatacagccttttagtttggatgctgaacagcctgattatgatttggattctgaagatgaagtatttgtgaataaactgaaaaagaaaatggacatctgcccattgcaatttgaggagatgattgaccgcctagaaaaaggcagtggtcagcagccagtcagtctgcaggaagccaaactactgctaaaagaagatgatgaactaattagagaagtttatgaatattggattaaaaagagaaaaaactgtcgagggccatctcttattccatcagtaaaacaagagaagcgagatggttccagcacaaatgatccttatgtggcttttagaaggcgtactgaaaaaatgcagactcgaaaaaatcgcaaaaatgatgaagcctcttacgaaaaaatgcttaagctgcgacgagatctaagtcgagctgttactattctagagatgataaaaagaagagaaaaaagtaaaagagagctattgcacttaacactggaaattatggaaaagaggtataatttgggcgactacaatggagagatcatgtctgaggttatggcacagagacagccaatgaaacctacttatgccatccccatcatccctattactaatagcagtcaatttaaacaccaggaagcaatggatgtgaaggagttcaaagttaataagcaagataaagccgatcttatccgaccgaaacggaaatatgaaaagaagcccaaagtcttaccatcgtctgccgctgctactccccaacagacgagtcctgctgcactgccagtcttcaatgctaaagatctgaatcagtatgactttcccagctcagacgaagaacctctctcccaggttttgtctggctcttcggaagctgaggaagacaatgatcctgatggtccttttgctttccgtaggaaagcaggctgtcagtactatgctcctcacttagaccaaactggcaactggccttggactagtcctaaagatggaggattaggggatgtgcgatatagatactgcttaactactctcaccgtaccccaaaggtgtattggatttgcacgaagacgggttgggcgcggtggaagggtcttactggacagagctcattcagactatgacagtgtgtttcaccatctggatttggaaatgctttcctcaccacaacattctccagtcaatcagtttgccaatacctcagaaacaaatacctcggacaaatctttctctaaagacctcagtcagatactagtcaatatcaaatcatgtagatggcggcattttaggcctcggacaccatccctacatgacagtgacaatgatgaactctcctgtagaaaattatataggagtataaaccgaacaggaacagcacaacctgggacccagacatgcagtacctctacgcaaagtaaaagtagcagtggttcagcacactttgcatttacagccgaacaataccagcaacatcaacagcaactggcactcatgcagaaacagcagcttgcacaaattcagcaacagcaagcaaatagtaattcctccaccaacacatcacagaaccttgcatctaaccagcagaaaagtggctttcgcctgaatatacagggtttagaaagaacactacagggttttgtttctaagactttggattctgctagtgcacagtttgctgcttctgctttggtgacatcagaacaactgatgggattcaagatgaaggatgatgtggtgcttggaatcggggtgaatggcgtccttccagcctcaggagtatacaagggcttacacctcagtagtactacaccaacagcacttgtacatacaagtccatcaacggcaggttcagctttgttacagccttcaaatattacacagacttcaagttcccacagtgcactgagtcatcaagtaactgctgccaattctgcaacaactcaggttctgattgggaacaacattcgattaactgtaccttcatcagttgccactgtaaactctattgccccaataaatgcacgacatatacctaggactttaagtgctgttccatcatctgccttaaagctggccgctgcagcaaactgtcaagtttccaaggtcccatcttcatcctctgtagattcagttccaagggaaaatcatgaatcagaaaagccagcactgaacaacatagcagacaacacagtagcgatggaggtgacgtagcttcctccgagtggaactgcagcctggggacttgattaggtgctatgcatcagtagcattttgaatgcaagggatgatggaaagcagcacatgcgtttctgtggcagctgtggggacttgacagcaatgctc

SEQ ID NO: 20 - DNA, 1512 bp, Homo sapiens
acttcgctgtgaagatggcgtcgggcagcgggacaaaaaacttggactttcgccgaaagtgggacaaagatgaatatgagaaactcgccgagaagaggctcacggaagagagagaaaagaaagatggaaaaccagtgcagcctgtcaagcgagagcttttacggcatagggactacaaggtggacttggaatccaagcttgggaagacaattgtcattaccaagacaacccctcaatctgagatgggaggatattactgcaatgtctgtgactgtgtggtgaaggactccatcaactttctggatcacattaatggaaagaaacatcagagaaacctgggcatgtctatgcgtgtggaacgttccaccctggatcaggtgaagaaacgttttgaggtcaacaagaagaagatggaagagaagcagaaggattatgattttgaggaaaggatgaaggagctcagagaagaggaggaaaaggccaaagcgtacaagaaagagaaacagaaggagaagaaaaggagggctgaggaggacttgacatttgaggaggacgatgagatggcagctgtgatgggcttctctggctttggttccaccaagaagagttactgaggctttctgtgcttggcctgactttggcctatgctggacctaactttgcgtgtgtgtgtgtgtagtagggggtcatttctttttgggtaatgggaaagttcttaagagtgtcaatggggagggatagagggtgggggctcatggtttccctctactttgggagagggcacagattgcagaggtaatgctgtggcatattgcttctgcctcagtgtatcactggagtcacaggaccctgcccacctgagttcccaataaagaaaaacctccccttctgaggctgctttcccaaaactccccctgcatctttatctcttcatctatcccacctcttgtctgaacatcccacctttatcctgtgttctgcctttgttttaattttaactcatgttcatcctgcaacagaagcattctctaggtcccagtttccagttgattgcatatccttgatcagccctttttcccatcctgccctatggttctctagccacctgtgcatgcatgtgtatttctgcctggttctatggtgtgtggatgtgtgtgcatgaatctgtcatatagagggggtccgagctggaatcctagagcattgctgccctggggcctgatgttcttggcttcctcagagcatgtaacaggaaattaaatgggatgagtgtttggtgtggtttgtgtctgatgagttttttaacattcaggtgtagattgtttcagcttctcttgtttcattttcctgaagatttatgtttttgtctaccttgtgagcaggcttttggaagaacctgtttgatgcaaaaaagaaaatgaaaaacaaaacaaaaaatccccaaaaccttattatgggggcccttcggtcttagaagctgtttgacatgtataataaatggcattgactggg

SEQ ID NO: 21 - DNA, 509 bp, Homo sapiens
tttttttttttttttttaacaccagaatctcttttagtctttaacaaaagtgtagtcggtcctgtgcatacatgggttctgcgtccctgaacccaaccaaccacagatcaaacatatttgaggaaaaaaaaaaattccacaaagtcctgaagagtaaaacttgaatttgccacgtgctgagtactatgttcaatttatgtgaatgaagtgacgtgcaggcattgtattaggtattataaataatctacacatacaagtatatgagaggatgtggttaggttatatgcaaatactacaatattttacataaggaatttgaacatctgtggtatccactgatacaaagggatgactgtacacagcaagaaaaaggcaaaaagtgattcattaatccacataatttttaaagatctgctttatctttaagttaaaaaaatgcccctttccccatcccatgccttgtataaactactcaataactgaagaaataaagttgcaccctcgtgccg

SEQ ID NO: 22 - DNA, 2109 bp, Homo sapiens
gattcggccggagctgccagcggggaggctgcagccgcgggttgttacagctgctggagcagcagcggcccccgctcccgggaaccgttcccgggccgttgatcttcggccccacacgaacagcagagaggggcagcaggatgaatgtgggcacagcgcacagcgaggtgaaccccaacacgcgggtgatgaacagccgtggcatctggctctcctacgtgctggccatcggtctcctccacatcgtgctgctgagcatcccgtttgtgagtgtccctgtcgtctggaccctcaccaacctcattcacaacatgggcatgtatatcttcctgcacacggtgaaggggacaccctttgagaccccggaccagggcaaggcgaggctgctaacccactgggagcagatggattatggggtccagttcacggcctctcggaagttcttgaccatcacacccatcgtgctgtacttcctcaccagcttctacactaagtacgaccagatccattttgtgctcaacaccgtgtccctgatgagcgtgcttatccccaagctgccccagctccacggagtccggatttttggaatcaataagtactgagagtgcagccccttcccctgcccagggtggcaggggaggggtagggtaaaaggcatgtgctgcaacactgaagacagaaagaagaagcctctggacactgccagagatgggggttgagcctctggcctaatttcccccctcgcttcccccagtagccaacttggagtagcttgtagtggggttggggtaggccccctgggctctgaccttttctgaattttttgatctcttccttttgctttttgaatagagactccatggagttggtcatggaatgggctgggctcctgggctgaacatggaccacgcagttgcgacaggaggccaggggaaaaacccctgctcacttgtttgccctcaggcagccaaagcactttaacccctgcatagggagcagagggcggtacggcttctggattgtttcactgtgattcctaggttttttcgatgccatgcagtgtgtgcttttgtgtatggaagcaagtgtgggatgggtctttgcctttctgggtagggagctgtctaatccaagtcccaggcttttggcagcttctctgcaacccaccgtgggtcctggttgggagtggggagggtcaggttggggaaagatggggtagagtgtagatggcttggttccagaggtgagggggccagggctgctgccatcctggcctggtggaggttggggagctgtaggagagctagtgagtcgagacttagaagaatggggccacatagcagcagaggactggtgtaagggagggaggggtagggacagaagctagacccaatctcctttgggatgtgggcagggagggaagcaggcttggagggttaatttacccacagaatgtgatagtaataggggagggaggctgctgtgggtttaactcctgggttggctgttgggtagacaggtggggaaaaggcccgtgagtcattgtaagcacaggtccaacttggccctgactcctgcgggggtatggggaagctgtgacagaaacgatgggtgctgtggtcctctgcaggccctcaccccttaacttcctcatgcagactggcactgggcagggcctctcatgtggcagccacatgtggcgttgtgaggccaccccatgtggggtctgtggtgagagtcctgtaggatccctgctcaagcagcacagaggaaggggcaagacgtggcctgtaggcactgtctcagcctgcagagaagaaagtgaggccgggagcctgagcctgggctggagccttctcccctccccagttggactaggggcagtgttaattttgaaaaggtgtgggtccctgtgtccttttccaggggtccaagggaacaggagaggtcactgggcctgttttctccctcctgaccctgcatctcccaccctgtgtatcatagggaactttcaccttaaaatctttctaagcaaagtgtgaataggatttttactccctttgtacagtattctgaggaacgcaaataaaagggcaacatgtttctgtt

SEQ ID NO: 23 - DNA, 666 bp, Homo sapiens
atctgtacaaattattgagtaataatagtatctcttataggattggtataaagacttaaaaagttaatgtcatgtaaaatgctttagcataatacctgactcagagtaaaggcttaataaaccctagctgatcttactgtcagaatcaataatattactatttgtaatataattaccagacttaacaaatgggagaagtattaaccatctgcaggaataagtaccagagcctgcatcaaaatagtttatattcaacatgaagtctttaaattggcaaaagcactcagtttaatatatacctgttaagaaaattttaagagacagtcatggtttttagctggatactctgggaaaccaaataaagcagataattgtacagtatgataatcaaaaaaaggatgtctttataaatagcttgaaatagttccccagatgcaacttgaataaaggaaataaatagccgacttgctctaacttgaggttagagcaaaattcctagtctgattcactggatgctgaaaacccttgccccacattttcccactccctcttggttagaaaaatttacattggtttagcattatactcttggagctattttttttcaaaaaaaaaaaaaaaaacctcgaggggggcccggtacccaattcgccctttgtgagtcgt

SEQ ID NO: 24 - DNA, 4134 bp, Homo sapiens
cgaagatggcggcgtcgcgtcgctctcagcatcatcaccaccatcatcaacaacagctccagcccgccccaggggcttcagcgccgccgccgccacctcctcccccactcagccctggcctggccccggggaccaccccagcctctcccacggccagcggcctggcccccttcgcctccccgcggcacggcctagcgctgccggagggggatggcagtcgggatccgcccgacaggccccgatccccggacccggttgacggtaccagctgttgcagtaccaccagcacaatctgtaccgtcgccgccgctcccgtggtcccagcggtttctacttcatctgccgctggggtcgctcccaacccagccggcagtggcagtaacaattcaccgtcgtcctcttcttccccgacttcttcctcatcttcctctccatcctcccctggatcgagcttggcggagagccccgaggcggccggagttagcagcacagcaccactggggcctggggcagcaggacctgggacaggggtcccagcagtgagcggggccctacgggaactgctggaggcctgtcgcaatggggacgtgtcccgggtaaagaggctggtggacgcggcaaacgtaaatgcaaaggacatggccggccggaagtcttctcccctgcacttcgctgcaggttttggaaggaaggatgttgtagaacacttactacagatgggtgctaatgtccacgctcgtgatgatggaggtctcatcccgcttcataatgcctgttcttttggccatgctgaggttgtgagtctgttattgtgccaaggagctgatccaaatgccagggataactggaactatacacctctgcatgaagctgctattaaagggaagatcgatgtgtgcattgtgctgctgcagcacggagctgacccaaacattcggaacactgatgggaaatcagccctggacctggcagatccttcagcaaaagctgtccttacaggtgaatacaagaaagacgaactcctagaagctgctaggagtggtaatgaagaaaaactaatggctttactgactcctctaaatgtgaattgccatgcaagtgatgggcgaaagtcgactcctttacatctagcagcgggctacaacagagttcgaatagttcagcttcttcttcagcatggtgctgatgttcatgcaaaagacaaaggtggacttgtgcctcttcataatgcatgttcatatggacattatgaagtcacagaactgctactaaagcatggagcttgtgttaatgccatggatctctggcagtttactccactgcacgaggctgcttccaagaaccgtgtagaagtctgctctttgttacttagccatggcgctgatcctacgttagtcaactgccatggcaaaagtgctgtggatatggctccaactccggagcttagggagagattgacttatgaatttaaaggtcattctttactacaagcagccagagaagcagacttagctaaagttaaaaaaacactcgctctggaaatcattaatttcaaacaaccgcagtctcatgaaacagcactgcactgtgctgtggcctctctgcatcccaaacgtaaacaagtgacagaattgttacttagaaaaggagcaaatgttaatgaaaaaaataaagatttcatgactcccctgcatgttgcagccgaaagagcccataatgatgtcatggaagttctgcataagcatggcgccaagatgaatgcactggacacccttggtcagactgctttgcatagagccgccctagcaggccacctgcagacctgccgcctcctgctgagttacggctctgacccctccatcatctccttacaaggcttcacagcagcacagatgggcaatgaagcagtgcagcagattctgagtgagagtacacctatacgtacttctgatgttgattatcgactcttagaggcatctaaagctggagacttggaaactgtgaagcaactttgcagctctcaaaatgtgaattgtagagacttagagggccggcattccacgcccttacacttcgcagcaggctacaaccgcgtgtctgttgtagagtacctgctacaccacggtgccgatgtccatgccaaagacaagggtggcttggtgccccttcataatgcctgttcatatggacactatgaggtggctgagcttttagtaaggcatggggcttctgtcaatgtggcggacttatggaaatttacccctctccatgaagcagcagctaaaggaaagtatgaaatctgcaagctccttttaaaacatggagcagatccaactaaaaagaacagagatggaaatacacctttggatttggtaaaggaaggagacacagatattcaggacttactgaaaggggatgctgctttgttggatgctgccaagaagggctgcctggcaagagtgcagaagctctgtaccccagagaatatcaactgcagagacacccagggcagaaattcaacccctctgcacctggcagcaggctataataacctggaagtagctgaatatcttctagagcatggagctgatgttaatgcccaggacaagggtggtttaattcctcttcataatgcggcatcttatgggcatgttgacatagcggctttattgataaaatacaacacgtgtgtaaatgcaacagataagtgggcgtttactcccctccatgaagcagcccagaaaggaaggacgcagctgtgcgccctcctcctagcgcatggtgcagaccccaccatgaagaaccaggaaggccagacgcctctggatctggcaacagctgacgatatcagagctttgctgatagatgccatgcccccagaggccttacctacctgttttaaacctcaggctactgtagtgagtgcctctctgatctcaccagcatccaccccctcctgcctctcggctgccagcagcatagacaacctcactggccctttagcagagttggccgtaggaggagcctccaatgcaggggatggcgccgcgggaacagaaaggaaggaaggagaagttgctggtcttgacatgaatatcagccaatttctaaaaagccttggccttgaacaccttcgggatatctttgaaacagaacagattacactagatgtgttggctgatatgggtcatgaagagttgaaagaaataggcatcaatgcatatgggcaccgccacaaattaatcaaaggagtagaaagactcttaggtggacaacaaggcaccaatccttatttgacttttcactgtgttaatcagggaacgattttgctggatcttgctccagaagataaagaatatcagtcagtggaagaagagatgcaaagtactattcgagaacacagagatggtggtaatgctggcggcatcttcaacagatacaatgtcattcgaattcaaaaagttgtcaacaagaagttgagggagcggttctgccaccgacagaaggaagtgtctgaggagaatcacaaccatcacaatgagcgcatgttgtttcatggttctcctttcattaatgccattattcataaagggtttgatgagcgacatgcatacataggaggaatgtttggggccgggatttattttgctgaaaactcctcaaaaagcaaccaatatgtttatggaattggaggaggaacaggctgccctacacacaaggacaggtcatgctatatatgtcacagacaaatgctcttctgtagagtgacccttgggaaatcctttctgcagtttagcaccatgaaaatggcccacgcgcctccagggcaccactcagtcattggtagaccgagcgtcaatgggctggcatatgctgaatatgtcatctacagaggagaacaggcatacccagagtatcttatcacttaccagatcatgaagccagaagccccttcccagaccgcaacagccgcagagcagaagacctagtgaatgcctgctggtgaaggccagatcagatttcaacctgggactggattacagaggattgtttctaataacaacatcaatattctagaagtccctgacagcctagaaataagctgtttgtcttctataaagcattgctatagtg

SEQ ID NO: 25 - DNA, 1094 bp, Homo sapiens
cagattctggctcaggaaagtgatgcaaacgcgtcgttttcaaaggagagaccccagcctcgggtcaggcgcggcgcagacagcggcgcggggtccttggctgggcggggcttgctcgcggtggcttgtggctccttcctgcggtgcttctctctttcgctcaggcccgtggcgccgacaggatgggcaagtgtcgtggacttcgtactgctaggaagctccgtagtcaccgacgagaccagaagtggcatgataaacagtataagaaagctcatttgggcacagccctaaaggccaacccttttggaggtgcttctcatgcaaaaggaatcgtgctggaaaaagtaggagttgaagccaaacagccaaattctgccattaggaagtgtgtaagggtccagctgatcaagaatggcaagaaaatcacagcctttgtacccaatgacggttgcttgaactttattgaggaaaatgatgaagttctggttgctggatttggtcgcaaaggtcatgctgttggtgatattcctggagtccgctttaaggttgtcaaagtagccaatgtttctcttttggccctatacaaaggcaagaaggaaagaccaagatcataaatattaatggtgaaaacactgtagtaataaattttcatatgccaaaaaatgtttgtatcttactgtcccctgttctcaccacgaagatcatgttcattaccaccaccacccccccttattttttttatcctaaaccagcaaacgcaggacctgtaccaattttaggagacaataagacagggttgtttcaggattctctagagttaataacatttgtaacctggcacagtttccctcatcctgtggaataagaaaatgggatagatctggaataaatgtgcagtattgtagtattactttaagaactttaagggaacttcaaaaactcactgaaattctagtgagatactttcttttttattcttggtattttccatatcgggtgcaacacttcagttaccaaatttcattgcacatagattatcttaggtacccttggaaatgcacattcttgtatccatcttacaggggcccaagatg

SEQ ID NO: 26 - DNA, 1565 bp, Homo sapiens
ctctttgcttttgcatggcttggcttagtatccaaggtatattagggccacttgaaagcatgaagaccagttatatagggaacaggtttctctcagtggcacattttgctttttctgagccccaaatacattgcctgggcatgaacattgttaccgtaaattgcacatggtcatggactgaattatgtgactttaaaggatgtaactgcccaacatttgcagattctgggtggtctatgtgaccatttgtctcgtatccaaaaaccccggggctattggaacccttccaacactttttcctttgtcatagacaagtttatatataacttaccaagatgttggctgtcctggtgtattgccagacagctgtcttttggttcccattccaaatgtgctgctgtccttctttgcatttcacaatatcaaagaaaccaccacccttcttcctaacagcattttatgccttttattccacattaaatgggaattgtgcctacttaggagtgcccctccaattaattacatgtgtccaagaataatccaagctagagacacaaggtgggaaaacatttcaaaaaaaaaaagtcctcttaaggccagtaatttatctgaaaaggtattttatcacaccttgacaccttatatatgagcctattaggagctgcaggtggtttcatagggtaaaatccaagaaaagagaaggatgtgtggggtttctattagaagataattttgttctcattttaccttttcttttatgatccttctctgctagaacaggttaattctccaaatttgttttgttttgttttgttattttttagggaactcttttgcaaaagcaatggtcggatgtaaataacatttaaagtatagtgcacataacttccccggactgttccaatctgataatttgtaaatgctttagagtttttttaattaacacttgtgttgctaaattctatttatgtaagtctgctaaagttttttagcccacttaaaacttaagacaaccatttaaaataatggatgggttactatgagcaatttcgctttcagaacccccttgttttagtatatgaaaaagcctaatgcgcattaatgaggttgaagagactatgagaaatatgtatagtgtatattttaaaacagctttgcttgtattgtgaagatttaaaaacaaacttgagatttttaacgtaactattaacacagttttaacataagttatcccactgggtttaagagcatcttgaatgtataatcctttttgtaacccaggttggtttctacttttaccagtcacccaaacatatttatgtttttagttttatgtactcatttccctttgttttcctcaaacagcatgatttttttgcacatgtagaaattttttaaaagaaagaaattagtacatcattttctctggattttcttcacttccctcttcctttctactaactccttccttaaaggccatatcactccatttgcattatttgtgcaaatgccagggttggtttttatttttatttttgctatttacctaaaaaaaaaaaaaaaaa

SEQ ID NO: 27 - DNA, 4877 bp, Homo sapiens
atggatggaggtgctttaactgatacaagtctcacagattcctattttagcaccagctttattggagtcaatggatttggaagccctgtagaaacaaaatatcccctgatgcagagaatgactaatagtagcagctccccaagccttctaaatgacagtgccaagccatattcagcccatgatcctctaacatcacctgcttcatccttgtttaatgactttggtgccctcaacatctctcagagacgaaagacaccaaatcctactgcaagcgagtttattcctaaaggaggatcaacctccaggctgagtaacgtgtcccagtcaaatatgtctgccttctctcaagttttctctcacccatccatgggaagccctgctactgctggattagcgccaggaatgtcgttgtctgctgggtcttcccctcttcattcccccaagattactccacatacttctcctgctcccagaagaagaagtcacactccaaatccagcaagttacatggtgccttctagtgcctctacatctgttaataatcctgtttctcagactccgtcttctggtcaggtgatccaaaaggaaactgttggtgggacgacttacttctatacagacacaactccagcacctttgactggaatggtgtttccaaactatcatatttatcctccaactgcacctcacgttgcttatatgcaaccgaaagcaaacgcaccttccttcttcatggctgatgaactccgacaggagctgatcaacagacatttaataacaatggctcaaattgatcaagcagatatgccagcagttcctacagaggttgacagctaccatagcctattccctctagaaccactgccacctcccaaccggatacagaaatcaagtaattttggatatattacatcttgctacaaagctgtaaacagcaaagatgatctgccatattgccttcggaggatacatggttttcgtcttgttaacacaaagtgcatggtgttggtcgacatgtggaagaaaattcaacactcaaatatcgtaactttgcgtgaagtatttaccactaaagcatttgctgagccctctcttgtgtttgcatatgatttccatgctggaggagaaactatgatgagcagacactttaatgaccctaatgctgatgcctacttcaccaagagaaagtggggtcagcacgagggaccattgcccaggcagcatgctggattattgccagaatctcttatttgggcatatattgtccaactaagttctgcattgcgtaccattcatacagcaggtttggcatgtcgagttatggatccaacaaagattctgataactggcaaaacaaggttgcgagtaaattgtgttggagtttttgatgttttaacatttgataacagtcaaaataataatccattggcattaatggcccagtaccagcaagcagatctgatatcattaggaaaagttgtgttggctttggcttgcaactctttggcaggaattcagcgagagaatttacagaaagccatggaactggtgacaatcaactattcctctgacctgaagaatctgattttgtatttgttgactgaccaaaacaggatgcgaagtgtaaatgacatcatgcccatgattggtgctcgattttatactcaattggatgctgctcaaatgagaaatgatgtcatagaggaagaccttgcaaaggaggttcaaaatggaagactgtttaggctcctagcaaaattgggaacaatcaatgagaggccggagtttcagaaggatcccacttggtcagagactggagaccgttatctgttgaaactctttagggatcatctttttcatcaggtgacagaagcaggtgctccctggattgacctcagtcatataatttcttgtcttaacaagctagatgctggtgtgccagaaaaaataagcctgatttccagagatgagaagagtgtacttgtggtgacctacagtgacttaaagcgctgctttgaaaatacttttcaagaactgattgcagctgcaaatggtcagttgtagtatttgctaaaaaagcacgcaggacatggctaaagaccttaaccaatagcaaattgcactacagctgaacttttcatcatctcattcacatttgggaaacgaacaggagatgagcaaagctgcttgcacttcagtcaggtacactgttacttgaaaggaagaatgtttcacttacccaagagctatggctgccattggaggctgttatctgtgaagaatttattttagatttaggagcaccatcaggtgaatgatgttcctgcttttgttttttccacttgtatatgcactaattttaattttttaaagactttttctgatctttgaacttttgccacattgtatacttataatgggaaactttgcaaggacatttttgggaagcaatgctgggcagcgtttttgccattgagggttgcagaatttgctctttttgggatgggttgccctgaataacattacggaccaggtaaataatttcatagaagttcagtatagtacgtaattcttgtaagagtatcgtatgcaagctctctgtatgccacccactgttagttcaaattgagatttttgttttgttttgttcttaagaacataccaagaaaataccagtgaattgttggatatgaattccctgttagttgatttaaatcctttctgaataaagatcagataaacagtaactgaaggagcatgtatagctctttccttcaaattcaactagagcctttttaaaaagacatttgcctgctagtcagatacatttacatttatgcaaattttttaaataggagaaaattaagaaattgtgttaaaggcctaaagttcaggagtgtattactttaggttctttccagtttgctggtttttttttttttttttttttttttttttgggcgggggggaggtttatgaagttttgctctttgaaccacagctttattatggtcctttacactggagacagacacagagacactgttcagaagatgaactaaactcagcagtggtctggtatcaagagctttctgatgttttacagcctgaatttggagggataacgatctgctgtgcctttgcagtcactgcttagcccaaagtaatagtacttttgataataactcactctgtgcgatattcctgaataagtccatctcaaaagtttgggattttcctcctcttaactttcttaatatttggacatgcagttgtcgccaaacttgggtattcatggaatttctagtaaatgaaatacctatactttgatactgaagactgccaaatacataggaattttctttcttaaaaaacagtaatgaagactatatctcctttcccagcactgaatgttttactagcactgggtgctcaccatgcaactgaagaaaatgtggaaactcaaaaggtcaggacagacttccaagcacttgcaactgatgttactgtcttcaattttaataattacacatatttgtatatttcagagaagtttttaatatttctctgtccactttttataagctttaaaatgattttctctgccttgagatttgcatcaagaaaaagcacctctcttcacctgaaagctttgaagactagagacacgctttacacgttttaacaagtatattgagtccacgtttggtagcatcagttgttgagttaaaaagaaaattattgcatttgatctggatggattttaaaagaatataatgttcaatattaaaaggataattcacatttgccaccataatgttcttttttatgtaaaaagaagaacttggagacattaacatgaaaaagtcttttatcattagctcatgtatttgaggaagagcagctgtctttttatatgttttttgacaaatcatattgtattcttttgtacaaaaaagaactacttgtattctagaagaaatatgaaatgcttaatttataagcgggctggagattttttccaatattgttttctttgaaaatgaaaggggatcatctattttagttttggggtctgggaactttttgaaaatttaatttgtggaccaatgttttgtgaaagctaaagagggcaggggttaaaatagggcttgaatttctcattctgtatagaccagcaaacttccctgtgcaaggcaagtttacatcacaaatccaagaatgtttgcatcctaaatgctagtttgcttcagcccctagttaacctcaggacttggtttgcatataaaaggtagacagctgatatgttttcatgaataaatattgtcagccagaaaaggttggtgtcaggtaatgcatatttttttaagctttgttttatatttatttttcatttagtttttattgggaatggttttcaaagaactctcagttctgcctaggtgtttttgggggagccctgttttccatagtgtaattccatttaagaggttgtctaaaagtctttttaattaatagaaagattttaatatccaagagtagtcaaattaaggatataaactttccacaccttcctgtcgtgacagataaaagcacagaaaggacaacccttgaaatcatgtaacgttggtcatttcaatattttgtacctgttttaaattctgttagtgtatttacttcattgtaaatatttttgagggtacctttgtattttgcttttgaccttggttctgtgatttggatgtcaacaacttccctaaaaagcaccagtgtgttaggttctaatgtcatgacccaatttgtgttattcatctttaatcctgttttcagtctctatgtgtacagcagtatttttaataaagaattacagagataaa

SEQ ID NO: 28 - DNA, 5052 bp, Homo sapiens
agtcccagctacttgggaggctgaggcaggaggattgcttgagcccaggagttggaggctacaataagctatgatccagctgctgcactctagcttgggtgacagagaccctgtcttcttaagacaaatccagaatttgggacatcttataatttagttgccctggattcttcaaaagtttaagctatgaagaaggacatccctcacactctgaaacagatctccttcagagacagagttttgcagcctctcatcagcttcctggatatgctcccacacctcagcctactggtctttctggaatatttgatactagtgtgaacagtgccagcagtaacactaaagagtcttcagtgatgaattttctgtctactgctgaatcccgaactgctcaggctgctgcttcaggaactactctcttaccacaattcagggctccatcctggcagacaggcatgcattcctcagcagcaactgagctgtttgctactggacctttgccaagcactggaacacttccaccatctctctctgcttatcagcatcccaccaccttcagcaatagaaactttgctaccacttcacctttggtgcttcaggattcaacttttaacactacatcaaatggaattttaagtcatcatgaccctttgctacaaatcaagacttcccagggaactgttccaactgctttggcatttgagcgcctgggcagttctgtattaagtaacagcataccacctcagtcttcaacataccgctcagctcaagagtctgcaccccatcttttacaacctcaatttagtttgttgccttcagcacttgggggatcccagcagactcctcaagcctacagttcaactctctttactagttctactgcttccattgaaagagctcttcttcgagaatgtagtgttattaaacaccatcagcggccttcaggtacccagtcaattcaggcacaactgactggttcacagcactccttacatagttatctatcaaattcaagtgtagttaattttcaggaaacaaccaggcagtcatctttatcctgtagcccaattggagattccactcagaatttgccagactctagcccgacccagaattatatttctatgcattcttcccaaaatgttcagactcaagagtcatcatctccccagtcccagaagtttttgcctgctgtccagtcatcatcttttgcatcctctactcattgtcagacattacaaaataacataacttcccctgacccaaagtcttatgctgaaagaaagcttgactcagatgtgtatccatcttcaaagcaagaagatggttttccaatgcaagagttacaggtgttgcagccacaagcatctcttgagtcatcaacccaaaggctatctgatggagaaattaatgctcaagaatcaacttataaggtgtcaaaggcagatgacagatattctcagagtgtaatcagaagtaattcccgtcttgaagatcaagttattggggttgctctgcaagcatcaaaaaaagaagaaagtgttgttggttcagtgacacaacttaaccaacaaattggccaagtcaataatgcagctacccttgatcttaagaactcaactaatttaatacagactccacaaataaggttgaatactaaagacttaaagcagcaacatcctctcatacttaaggtgcatgagtccaaggtccaggaacagcacgatcaaataattaatgcttcatctcagattcaaattccaaatcatgctttagggcatggccatcaggcatctcttcctaatacacaggtccttttagattctgcctgtgatttacaaattcttcagcagtcaatactgcaggcaggtttaggtcaagtaaaggcatctttacaagcacagcgtgttcaaagccctcaacaaatagtacatcccttccttcagatggaaggtcatgttattcaaagcaatggtgatcattctcagcagcaactccatcctcaaaattctgaagttatgaaaatggacctctctgagtcttcaaaaccattacaacaacatctaacaacaaagggccattttagtgaaacaaatcaacatgattcaaagaatcagtttgtttctcttggatcgatgtgtttcccagaggcagtgcttcttagtgatgaaagaaatattttatcaaatgtagatgatatcttagcagctacagcagcagcttgtggagttacacctactgatttttccaagtcaacttcaaatgaaaccatgcaggctgttgaagatggtgattctaaatctcattttcagcagtcattagatgtcaggcatgtgacttcagattttaactctatgacagctacagtaggaaagccacagaatataaatgatacttccttaaatggaaatcaggttactgtgaacctttcaccagtacctgcccttcagtcaaaaatgactcttgatcaacagcacattgaaacacctggtcaaaatataccaactaaagtaacttcagcagtggttggaccaagtcatgaagtccaggagcaaagttctggcccattcaagaaacagtctgctaccaatcttgaatctgaagaagacagtgaagctcctgttgatagtacattaaataataacagaaaccaagagtttgtttctagtagtagaagtataagtggagagagtgctacatcagagagtgaatttaccttagggggtgacgacagtggtgtgtcaatgaacccagctaggagtgcacttgcactgttggccatggcccaatctggggatgcagtcagtgtcaagattgaagaagaaaaccaagatttaatgcattttaaccttcaaaagaaaagagctaaaggaaaagggcaagttaaagaggaagacaacagtaatcagaaacagctgaaaagacctgcccaaggcaaacgccagaatccaaggggaacagatatttacttaccgtatactcctccttcctcagaaagctgccatgatggttatcagcatcaagaaaaaatgagacagaagatcaaagaggtggaggaaaaacaaccggaagtcaaaacaggatttattgcttctttcttagattttctgaaatccgggcccaagcagcagttttccactcttgctgtacgaatgcctaacaggactagacggccagggacccagatggttcgtacattttgtcccccaccacttcccaagccttcatctacaacacccacacctttagtgtctgaaactggcggtaacagtccatcagataaagttgataatgaacttaaaaacttggaacatttatcttcattttcttctgatgaagatgatcctggatatagtcaagatgcttataaaagcgtctctactcccttaactactttggatgctacttctgataaaaagaagaaaacagaagccctacaggtggcaactactagcccaactgccaatactactggtactgctactacttcctcaaccactgtgggtgcagttaagcaagaacctctccactctacttcatatgcagtaaatattctggaaaatataagctcttcagaatcctcaaagcccattgaacttgatggtcttccttcagaccagtttgcaaaaggacaggacactgttgccatagaaggttttacagatgaggaggacacagaaagcggaggagaaggccaatacagagagcgtgatgaatttgtggtaaagatagaagacatagagacttttaaggaggctttaaaaacaggaaaagaacctccagctatttggaaagtacaaaaagctttattacagaaatttgttcctgaaattcgagatggtcaaagagaatttgctgctacaaatagttatcttggatattttggagatgcaaagagtaaatacaaaagaatatatgtgaagttcattgaaaatgcaaacaagaaggaatatgtcagagtgtgttctaaaaagccaagaaataaaccttcacaaactatcagaactgttcaagctaagccaagtagtagcagtaaaacttctgatcctctagcatcaaaaactacaactacaaaagccccttccgtgaaacccaaagttaaacagccaaaagtaaaggctgagccaccaccaaagaaacggaaaaaatggaaagaagaattttcatcatcccaatctgactcatctcctgagatccatactagtagtagtgacgatgaggaatttgaacctcccgctccctttgtcactcgctttttgaacacaagagcaatgaaggaaacctttaagagctacatggaatagcttgttagcattgccttggaccctgacacaatgcaagccttagagaagagcaatgatgagctacttttacctcatatgaaaaaaatagatggcatgctaaatgataaccgaaagagacttcttttgaatcttcatttggatcaatcattcaagaatgctttggaaagttttcctgaactaacaataattactcgagattctaaagcaaagagtggaggaactgctatttctaaaatcaaaatgaatggcaaagcctataataagaaaactctaaggacttctaaaacaaccaccaaatctgcacaagagtttgctgtcgatccagagaaaatacagttgtattctttgtatcattcactccatcattataagtaccatgtttatctgatatgtaaggatgagatttcttcggtgcagaaaaaaaatgaagatttaggacaggaggaaattgttcaactttgtatgaaaaatgtaaaatgggtggaggacctctttgaaaaatttggagaacttctaaatcataccggaatgttgggagaaatgcaaagcgtctcagttagcagcaccagaagatcagagcagcagaatattctagaggctgggaagtccaagatcaaggtacctgtatctggtgactgttgagagccttcttgctgtgccttagaatgaaagaaggtggagggcaaggtgatatgaacaatgtgcctttacatggcaaaagaatgaaagaaagtaaacctattcccac

SEQ ID NO: 29 - DNA, 2261 bp, Homo sapiens
tcacctctgcattgtgttggcttgctgtgtatcctttcagcttcagtttcctttgcgaactgtgattacttttaatagctcgattccaattcctgagaagacaaatttactaggcctgttgtatcccagtttagttaagatatttatatacccacagcaacagtttgtggatcttcacttttgttttctgccattaatatgatgattaccctgttttgctgcttttactttgcttgtttcttatagcttagcttataaagtatccattaacaactgactgttggacttctctctctttgtttcaaggactgcaattgcaaatgcctgtaggatccagatgccataaatgtataagatggttctggtgttttcttcttttcttgaaacactgtcttgtgtgtgtgaggggggtgatcttttgttcagtcatttttgatagagacattagaagagcgatttctttaaaatataaacaagggtgcaaatgggatggtaaagggcaactgacgctactaggaggatagtagggagtgtttgacattgtgtgtaattgggacatacatatttcctccaaaagggaagactttagtacttctgctgattgttgcctagtggaaatgtctgcctaagattaccagttgtctacaaaaagcctgattggcttcaggtttttttttttttttaatttagatatgatttaacgtatatgataggatgtgtataggttgtatgcaattactagaacattttctataaaggtcatgaatatctgtggtggatcctggaaccaatggggttgggagggcagcttcaattgttttaaaatgtttcaggccaacagaatatgcttataaatgcttttataacctcatagcttctgtttctttatagttttggcttatttgtaatgtttcctttttctcatgtggtacaaaacatggttatgtaccattacctcttcaactcagccagtggcttggcagtttcccttgtgcagtgtttaaaactgggccacagttttgaatgcagttgtggatattaaaatgaaatagattaggaaagaatagattaagatagaatacagataagaaaataagaaaatatcagccttcatctggcaaagaaaataccagccttcatctggcaaagggcatcatcaggcatcaccaggaggtgctctgtatccataggttccctatctgtgggttccaccaccactgataaaaaatatttggaaaaaaatacaacaatgcaaaataatacaaatttaaaaaaatacaatatatttatgtggtgtttacattgtattcgttattataagtaatctagagatgatttaaagggacgggaagatatatgtaggttatatgtaaatataccattttatataaggaacgtgtatatccatggattttagaatctgtagggattcctggaaccagtcttccatggataccgagggatgactgtattgttctgtgaaatttttgtcccagctacatatttgtatgtatgtatgtttttggtccggtataattgtataatatttcttactatgggttaaacaactttataagacattgtgaggaacctggtatcctctggactagatcattcccgtagacagttccattgtgcacacatagtatttcgttaaaatcaggtgactgtttaaaaattaaaaagattttagataaaaatctagatttttactttctcctgaaatatcagaagatggggtctaaattcacactgaggccaagcagtggtaggctcattttaaagaagggctttctgctctctggtttaccccattgtatactaattagcctggtcttacttttatatattacctgaatagccacttagggcattttgaacacgtggcttgcattgctttgtctttttgaaatccgctgtggcaggcccaaaccttgcctttggtgggcttaagtaaggtctggtttccagtacaaaggcaaaggcaaatgaggattattagtattccattttgccctatggatattctcagtgctttctactggaaactcacaaccaattctgaatatgccacatactgtgtgatttgcccttgctgtccaaccctgttcttgctgccatttaaaaacaatcaggccaggtgtggtggctcatttctgtggtcccggcactttgggaggccggggtgggtggatcatttgagctctggagttcgagaccagccagggccgcatggcgagacctcgtctctactaaaaatt

SEQ ID NO: 30 - DNA, 2219 bp, Homo sapiens
ggcaggtgttgaggggctcccggtccggctgccgccgctcccccgctccggacccggggctccccctagcgccgctgaggagccgcctctgcggctccaggagggcgcaggagcgggactgagagcgcctggaggctcgagcggagggtaattcatttgcacacctgttagcaagaaacagaagttgaaggactggaacaagtgaactaggaaagagggaacgccaatccaaggatagaaggacaaggacagaatcaccagcactggctgaaggcctcctgtttcctgcgctttctccttttcctgtgaaatctccgaggagaagaaagaatgatggacagtttatcctttcactgccacaaggcctgtttacttggcagtaggtccttaagttccttgcttttttgctgctgtttggtgactggaagaggcaccagagactctcactctggggaggtttgctggcatgggtaatctcattaaggtgctaaccagggacatagaccacaatgcagcacattttttcttggactttgaaagtaccttaacatggggaatcttcttaaagttttgacatgcacagaccttgagcaggggccaaattttttccttgattttgaaaatgcccagcctacagagtctgagaaggaaatttataatcaggtgaatgtagtattaaaagatgcagaaggcatcttggaggacttgcagtcatacagaggagctggccacgaaatacgagaggcaatccagcatccagcagatgagaagttgcaagagaaggcatggggtgcagttgttccactagtaggcaaattaaagaaattttacgaattttctcagaggttagaagcagcattaagaggtcttctgggagccttaacaagtaccccatattctcccacccagcatctagagcgagagcaggctcttgctaaacagtttgcagaaattcttcatttcacactccggtttgatgaactcaagatgacaaatcctgccatacagaatgatttcagctattatagaagaacattgagtcgtatgaggattaacaatgtaccggcagaaggagaaaatgaagtaaataatgaattggcaaatcgaatgtctttgttttatgctgaggcaactccaatgctgaaaaccttgagtgatgccacaacaaaatttgtatcagagaataaaaatttaccaatagaaaataccacagattgtttaagcacaatggctagtgtatgcagagtcatgctggaaacaccggaatacagaagcagatttacaaatgaagagacagtgtcattctgcttgagggtaatggtgggtgtcataatactctatgaccacgtacatccagtgggagcatttgctaaaacttccaaaattgatatgaaaggttgtatcaaagttcttaaggaccaacctcctaatagtgtggaaggtcttctaaatgctctcaggtacacaacaaaacatttgaatgatgagactacctccaagcaaattaaatccatgctgcaataacaattctggaataagcacctgctgtagacagaagacagtattctgcaatgactgagaatgcagttttttagtgattgcaattactatctcatttattcttgcttttatttctttcctctgttcctcttccctcttttttaatcatgttcttaagacttcttttctgtgccaaaatcagtaaagttacactctgaagggatatcatcctttcaaacgggccatctaaggcagctaattatgcattgcattggggtctctactgagaaaaattctgtgacttgaactaaatatttttaaatgtggattttttttgaaactaatatttaatattgcttctcctgcatggcaaaactgcctattctgctatttaaaaaccctcaatgactttattttctactgccgcctttttcatgtgcaaccaaaatgaaaatgtttaaattaactgtgttgtacaaatggtacccaacacaaactttttttaaattagtaatacttttgtttaaagttttaagtttgcattttgactttttttgtaaggatgtatgttgtgtgtttaacctttattaactaacgttaaaagctgtgatgtgtgcgtagaatattacgtatgcatgttcatgtctaaagaatggctgttgatgataaaataaaaatcagctttcatttttctaaaaaaaaaaaaaaaaaaaaaaaaa

SEQ ID NO: 31 - DNA, 10220 bp, Homo sapiens
ggaaactctgaaagaacttagaatcagcattttgagagcagaagcttgggcatgctgtgattttccaataaactgctatcacaatgtcaaaatgcagttcagacaagagcaacacagagatctcaaacattaaaacgtaagctgtgctagaacaaaaatgcaatgaaagaaacactggatgaatgaaaagccctgctttgcaacccctcagcatggcaggcctgcagctcatgacccctgcttcctcaccaatgggtcctttctttggactgccatggcaacaagaagcaattcatgataacatttatacgccaagaaaatatcaggttgaactgcttgaagcagctctggatcataataccatcgtctgtttaaacactggctcagggaagacatttattgcagtactactcactaaagagctgtcctatcagatcaggggagacttcagcagaaatggaaaaaggacggtgttcttggtcaactctgcaaaccaggttgctcaacaagtgtcagctgtcagaactcattcagatctcaaggttggggaatactcaaacctagaagtaaatgcatcttggacaaaagagagatggaaccaagagtttactaagcaccaggttctcattatgacttgctatgtcgccttgaatgttttgaaaaatggttacttatcactgtcagacattaaccttttggtgtttgatgagtgtcatcttgcaatcctagaccacccctatcgagaaattatgaagctctgtgaaaattgtccatcatgtcctcgcattttgggactaactgcttccattttaaatgggaaatgtgatccagaggaattggaagaaaagattcagaaactagagaaaattcttaagagtaatgctgaaactgcaactgacctggtggtcttagacaggtatacttctcagccatgtgagattgtggtggattgtggaccatttactgacagaagtgggctttatgaaagactgctgatggaattagaagaagcacttaattttatcaatgattgtaatatatctgtacattcaaaagaaagagattctactttaatttcgaaacagatactatcagactgtcgtgccgtattggtagttctgggaccctggtgtgcagataaagtagctggaatgatggtaagagaactacagaaatacatcaaacatgagcaagaggagctgcacaggaaatttttattgtttacagacactttcctaaggaaaatacatgcactatgtgaagagcacttctcacctgcctcacttgacctgaaatttgtaactcctaaagtaatcaaactgctcgaaatcttacgcaaatataaaccatatgagcgacagcagtttgaaagcgttgagtggtataataatagaaatcaggataattatgtgtcatggagtgattctgaggatgatgatgaggatgaagaaattgaagaaaaagagaagccagagacaaattttccttctccttttaccaacattttgtgcggaattatttttgtggaaagaagatacacagcagttgtcttaaacagattgataaaggaagctggcaaacaagatccagagctggcttatatcagtagcaatttcataactggacatggcattgggaagaatcagcctcgcaacaaacagatggaagcagaattcagaaaacaggaagaggtacttaggaaatttcgagcacatgagaccaacctgcttattgcaacaagtattgtagaagagggtgttgatataccaaaatgcaacttggtggttcgttttgatttgcccacagaatatcgatcctatgttcaatctaaaggaagagcaagggcacccatctctaattatataatgttagcggatacagacaaaataaaaagttttgaagaagaccttaaaacctacaaagctattgaaaagatcttgagaaacaagtgttccaagtcggttgatactggtgagactgacattgatcctgtcatggatgatgatgacgttttcccaccatatgtgttgaggcctgacgatggtggtccacgagtcacaatcaacacggccattggacacatcaatagatactgtgctagattaccaagtgatccgtttactcatctagctcctaaatgcagaacccgagagttgcctgatggtacattttattcaactctttatctgccaattaactcacctcttcgagcctccattgttggtccaccaatgagctgtgtacgattggctgaaagagttgtagctctcatttgctgtgagaaactgcacaaaattggcgaactggatgaccatttgatgccagttgggaaagagactgttaaatatgaagaggagcttgatttgcatgatgaagaagagaccagtgttccaggaagaccaggttccacgaaacgaaggcagtgctacccaaaagcaattccagagtgtttgagggatagttatcccagacctgatcagccctgttacctgtatgtgataggaatggttttaactacacctttacctgatgaactcaactttagaaggcggaagctctatcctcctgaagataccacaagatgctttggaatactgacggccaaacccatacctcagattccacactttcctgtgtacacacgctctggagaggttaccatatccattgagttgaagaagtctggtttcatgttgtctctacaaatgcttgagttgattacaagacttcaccagtatatattctcacatattcttcggcttgaaaaacctgcactagaatttaaacctacagacgctgattcagcatactgtgttctacctcttaatgttgttaatgactccagcactttggatattgactttaaattcatggaagatattgagaagtctgaagctcgcataggcattcccagtacaaagtatacaaaagaaacaccctttgtttttaaattagaagattaccaagatgccgttatcattccaagatatcgcaattttgatcagcctcatcgattttatgtagctgatgtgtacactgatcttaccccactcagtaaatttccttcccctgagtatgaaacttttgcagaatattataaaacaaagtacaaccttgacctaaccaatctcaaccagccactgctggatgtggaccacacatcttcaagacttaatcttttgacacctcgacatttgaatcagaaggggaaagcgcttcctttaagcagtgctgagaagaggaaagccaaatgggaaagtctgcagaataaacagatactggttccagaactctgtgctatacatccaattccagcatcactgtggagaaaagctgtttgtctccccagcatactttatcgccttcactgccttttgactgcagaggagctaagagcccagactgccagcgatgctggcgtgggagtcagatcacttcctgcggattttagataccctaacttagacttcgggtggaaaaaatctattgacagcaaatctttcatctcaatttctaactcctcttcagctgaaaatgataattactgtaagcacagcacaattgtccctgaaaatgctgcacatcaaggtgctaatagaacctcctctctagaaaatcatgaccaaatgtctgtgaactgcagaacgttgctcagcgagtcccctggtaagctccacgttgaagtttcagcagatcttacagcaattaatggtctttcttacaatcaaaatctcgccaatggcagttatgatttagctaacagagacttttgccaaggaaatcagctaaattactacaagcaggaaatacccgtgcaaccaactacctcatattccattcagaatttatacagttacgagaaccagccccagcccagcgatgaatgtactctcctgagtaataaataccttgatggaaatgctaacaaatctacctcagatggaagtcctgtgatggccgtaatgcctggtacgacagacactattcaagtgctcaagggcaggatggattctgagcagagcccttctattgggtactcctcaaggactcttggccccaatcctggacttattcttcaggctttgactctgtcaaacgctagtgatggatttaacctggagcggcttgaaatgcttggcgactcctttttaaagcatgccatcaccacatatctattttgcacttaccctgatgcgcatgagggccgcctttcatatatgagaagcaaaaaggtcagcaactgtaatctgtatcgccttggaaaaaagaagggactacccagccgcatggtggtgtcaatatttgatccccctgtgaattggcttcctcctggttatgtagtaaatcaagacaaaagcaacacagataaatgggaaaaagatgaaatgacaaaagactgcatgctggcgaatggcaaactggatgaggattacgaggaggaggatgaggaggaggagagcctgatgtggagggctccgaaggaagaggctgactatgaagatgatttcctggagtatgatcaggaacatatcagatttatagataatatgttaatggggtcaggagcttttgtaaagaaaatctctctttctcctttttcaaccactgattctgcatatgaatggaaaatgcccaaaaaatcctccttaggtagtatgccattttcatcagattttgaggattttgactacagctcttgggatgcaatgtgctatctggatcctagcaaagctgttgaagaagatgactttgtggtggggttctggaatccatcagaagaaaactgtggtgttgacacgggaaagcagtccatttcttacgacttgcacactgagcagtgtattgctgacaaaagcatagcggactgtgtggaagccctgctgggctgctatttaaccagctgtggggagagggctgctcagcttttcctctgttcactggggctgaaggtgctcccggtaattaaaaggactgatcgggaaaaggccctgtgccctactcgggagaatttcaacagccaacaaaagaacctttcagtgagctgtgctgctgcttctgtggccagttcacgctcttctgtattgaaagactcggaatatggttgtttgaagattccaccaagatgtatgtttgatcatccagatgcagataaaacactgaatcaccttatatcggggtttgaaaattttgaaaagaaaatcaactacagattcaagaataaggcttaccttctccaggcttttacacatgcctcctaccactacaatactatcactgattgttaccagcgcttagaattcctgggagatgcgattttggactacctcataaccaagcacctttatgaagacccgcggcagcactccccgggggtcctgacagacctgcggtctgccctggtcaacaacaccatctttgcatcgctggctgtaaagtacgactaccacaagtacttcaaagctgtctctcctgagctcttccatgtcattgatgactttgtgcagtttcagcttgagaagaatgaaatgcaaggaatggattctgagcttaggagatctgaggaggatgaagagaaagaagaggatattgaagttccaaaggccatgggggatatttttgagtcgcttgctggtgccatttacatggatagtgggatgtcactggagacagtctggcaggtgtactatcccatgatgcggccactaatagaaaagttttctgcaaatgtaccccgttcccctgtgcgagaattgcttgaaatggaaccagaaactgccaaatttagcccggctgagagaacttacgacgggaaggtcagagtcactgtggaagtagtaggaaaggggaaatttaaaggtgttggtcgaagttacaggattgccaaatctgcagcagcaagaagagccctccgaagcctcaaagctaatcaacctcaggttcccaatagctgaaaccgctttttaaaattcaaaacaagaaacaaaacaaaaaaaattaaggggaaaattatttaaatcggaaaggaagacttaaagttgttagtgagtggaatgaattgaaggcagaatttaaagtttggttgataacaggatagataacagaataaaacatttaacatatgtataaaattttggaactaattgtagttttagttttttgcgcaaacacaatcttatcttctttcctcacttctgctttgtttaaatcacaagagtgctttaatgatgacatttagcaagtgctcaaaataattgacaggttttgtttttttttttttgagtttatgtcagctttgcttagtgttagaaggccatggagcttaaacctccagcagtccctaggatgatgtagattcttctccatctctccgtgtgtgcagtagtgccagtcctgcagtagttgataagctgaatagaaagataaggttttcgagaggagaagtgcgccaatgttgtcttttctttccacgttatactgtgtaaggtgatgttcccggtcgctgttgcacctgatagtaagggacagatttttaatgaacattggctggcatgttggtgaatcacattttagttttctgatgccacatagtcttgcataaaaaagggttcttgccttaaaagtgaaaccttcatggatagtctttaatctctgatctttttggaacaaactgttttacattcctttcattttattatgcattagacgttgagacagcgtgatacttacaactcactagtatagttgtaacttattacaggatcatactaaaatttctgtcatatgtatactgaagacattttaaaaaccagaatatgtagtctacggatattttttatcataaaaatgatctttggctaaacaccccattttactaaagtcctcctgccaggtagttcccactgatggaaatgtttatggcaaataattttgccttctaggctgttgctctaacaaaataaaccttagacatatcacacctaaaatatgctgcagattttataattgattggttacttatttaagaagcaaaacacagcacctttacccttagtctcctcacataaatttcttactatacttttcataatgttgcatgcatatttcacctaccaaagctgtgctgttaatgccgtgaaagtttaacgtttgcgataaactgccgtaattttgatacatctgtgatttaggtcattaatttagataaactagctcattatttccatctttggaaaaggaaaaaaaaaaaaacttctttaggcatttgcctaagtttctttaattagacttgtaggcactcttcacttaaatacctcagttcttcttttcttttgcatgcatttttcccctgtttggtgctatgtttatgtattatgcttgaaattttaatttttttttttttgcactgtaactataatacctcttaatttacctttttaaaagctgtgggtcagtcttgcactcccatcaacataccagtagaggtttgctgcaatttgccccgttaattatgcttgaagtttaagaaagctgagcagaggtgtctcatatttcccagcacatgattctgaacttgatgcttcgtggaatgctgcatttatatgtaagtgacatttgaatactgtccttcctgctttatctgcatcatccacccacagagaaatgcctctgtgcgagtgcaccgacagaaaactgtcagctctgctttctaaggaaccctgagtgaggggggtattaagcttctccagtgttttttgttgtctccaatcttaaacttaaattgagatctaaattattaaacgagtttttgagcaaattaggtgacttgttttaaaaatatttaattccgatttggaaccttagatgtctatttgattttttaaaaaaccttaatgtaagatatgaccagttaaaacaaagcaattcttgaattatataactgtaaaagtgtgcagttaacaaggctggatgtgaattttattctgagggtgatttgtgatcaagtttaatcacaaatctcttaatatttataaactacctgatgccaggagcttagggctttgcattgtgtctaatacattgatcccagtgttacgggattctcttgattcctggcaccaaaatcagattgttttcacagttatgattcccagtgggagaaaaatgcctcaatatatttgtaaccttaagaagagtatttttttgttaatactaagatgttcaaacttagacatgattaggtcatacattctcaggggttcaaatttccttctaccattcaaatgttttatcaacagcaaacttcagccgtttcactttttgttggagaaaaatagtagattttaatttgactcacagtttgaagcattctgtgatcccctggttactgagttaaaaaataaaaaagtacgagttagacatatgaaatggttatgaacgcttttgtgctgctgatttttaatgctgtaaagttttcctgtgtttagcttgttgaaatgttttgcatctgtcaattaaggaaaaaaaaaatcactctatgttgccccactttagagccctgtgtgccaccctgtgttcctgtgattgcaatgtgagaccgaatgtaatatggaaaacctaccagtggggtgtggttgtgccctgagcacgtgtgtaaaggactggggaggcgtgtcttgaaaaagcaactgcagaaattccttatgatgattgtgtgcaagttagttaacatgaaccttcatttgtaaattttttaaaatttcttttataatatgctttccgcagtcctaactatgctgcgttttataatagctttttcccttctgttctgttcatgtagcacagataagcattgcacttggtaccatgctttacctcatttcaagaaaatatgcttaacagagaggaaaaaaatgtggtttggccttgctgctgttttgatttatggaatttgaaaaagataattataatgcctgcaatgtgtcatatactcgcacaacttaaataggtcatttttgtctgtggcatttttactgtttgtgaaagtatgaaacagatttgttaactgaactcttaattatgtttttaaaatgtttgttatatttcttttcttttttcttttatattacgtgaagtgatgaaatttagaatgacctctaacactcctgtaattgtcttttaaaatactgatatttttatttgttaataatactttgccctcagaaagattctgataccctgccttgacaacatgaaacttgaggctgctttggttcatgaatccaggtgttcccccggcagtcggcttcttcagtcgctccctggaggcaggtgggcactgcagaggatcactggaatccagatcgagcgcagttcatgcacaaggccccgttgatttaaaatattggatcttgctccgttagggtgcctaatccctttacacaagattgaagccaccaaactgagaccttgatacctttttttaactgcatctgaaattatgttaagagtctttaacccatttgcattatctgcagaagagaaactcatgtcatgtttattacctatatggttgttttaattacatttgaataattatatttttccaaccactgattacttttcaggaatttaattatttccagataaatttctttattttatattgtacatgaaaagttttaaagatatgtttaagaccaagactattaaaatgatttttaaagttgttggagacgccaatagcaatatctaggaaatttgcattgagaccattgtattttccactagcagtgaaaatgatttttcacaactaacttgtaaatatattttaatcattacttctttttttctagtccatttttatttggacatcaaccacagacaatttaaattttatagatgcactaagaattcactgcagcagcaggttacatagcaaaaatgcaaaggtgaacaggaagtaaatttctggcttttctgctgtaaatagtgaaggaaaattactaaaatcaagtaaaactaatgcatattatttgattgacaataaaatatttaccatcacatgctgcagctgttttttaaggaacatgatgtcattcattcatacagtaatcatgctgcagaaatttgcagtctgcaccttatggatcacaattacctttagttgttttttttgtaataattgtagccaagtaaatctccaataaagttatcgtctgttc

SEQ ID NO: 32 - DNA, 7638 bp, Homo sapiens
gcgccccgcaggaagtgcttccctgggcggaagcttctgagcgtgatatagcggaagtgccttctcttccggtctttctggtctcggccgcagaagcgagatgacgaagggaacgtcatcgtttggaaagcgtcgcaataagacgcacacgttgtgccgccgctgtggctctaaggcctaccaccttcagaagtcgacctgtggcaaatgtggctaccctgccaagcgcaagagaaagtataactggagtgccaaggctaaaagacgaaataccaccggaactggtcgaatgaggcacctaaaaattgtataccgcagattcaggcatggattccgtgaaggaacaacacctaaacccaagagggcagctgttgcagcatccagttcatcttaagaatgtcaacgattagtcatgcaataaatgttctggttttaaaaaatacatatctggttttggtaaggtatttttaatcaattaggcttgtagtatcagtgaaatactgtaggtttagggactgggctagcttcatatcagatttacttgttaagtgactgttttggaatgtttacttttggactgggtttgtaacacggttaaaggcaatgagaaacaagcagaattccaggagtccttgaagcagagggcactggaagacaatatagcagattaaaatagcacagctcatgtggcataggtgggtattttagatgtttgagtaaatttgaaagagtatgatgtttaaattacctttagcaacatgttcatctgctatgctgtcatgactagggggatgattattagtcacatagagcttgggagtaccactggaaacgtatgggtaggagtttaggtggcttctgtttttcaaaagatgatcttatcctagtatctgtaatgctcacttggcacacctgacttgtgggctgtgtgtaaggtggctagctaagtgaaaaaagcctgctaggtgtgagtcaacttaagaatatgtaaataggtttgagaaaaagtagggcttgggtgcaagtaaagattgagcaggaaataaaggaaaatcaagtataatccctgagatttgtagactaaaggcaatgatgtgggactacttggtcgaatttttttagccctcaacttggtaattgggtgtttctgtgttaaagcactgaaacttgctgtcgtgccttcctagttttcgtggtttattgacagggttgggggttttttttgtttttttaaaatgaagggacaaagtcaactggactgctgagtgagagggcaggggcagttgaagggaacatgaattgctggaacagctacataaaatagtgatgtagccaagtcatgctatttaaattataattctccactgtgtttagaataacatctgaggttcttaacctggccttggaagggtatcacttttacttgtaacctggaatggctttataatgtgctagctaattgctactctcatcttgtattttaactcctaatttacccttcaggtctcagcttcagaacattcacttataaagaaaccctgctgattaaatctctcttgggcttcctcccgaaatgtgagactatactttaaagatgtatggttagagtccaattgccattgcctttcttgtttacagatagtgcaatggcgcaatcctggctcactgcagcctctaattcctgggctcaagtcaagtggttctcctgcctcagccttctgagtagctgggactacagatgcacaccaccacacctggctaatttttgtgttttttgtagagatggagattcactcgactaattctttttgtattcttagtagagactgggtttcaacatgttgaccaggctggtctcgaactcgacctcgtgatccgccgcctcggcctcccaaagtgctaggattacaggcgtgagccaccactcccggctgtcatcatcaaattttcaagtgaagatagtctgttgaagattgaacaatgaccttgaaagacagctgagttgctgtgggtataatgtaaagctggtgaagtttggccagtttgggcttcagaagtctaagtctagtgaaggtaccctgacccccatataaacaacccttgaggccggtgtggtggctcacggctgtaatcctggcactttgggaggccgaggtgggcggatcacaaggtcaagagatcgagatcaccctggcccacatggtgagaccccaactctactaaaaatacaaaaattagctgggtgtggtggcatgtgcctgtagtcttagctacttgagaggctgaggcaggagaatcgcttgaacctgggaggcagaggttgcagtgagctgagatcatgccactgtgctccagcctggtggcacagtgagactccacctcaaaaaaaaaaaaaaatccttgaactaatgactcaaattttcaaatgaaacaaaataagcagtggatcttgcattggagatggagttaaactatgttgcccaggctggtcttggactcctggtttcaagtgatcctctcatcttggcctcccaaagtgctgggattacagggacgagccaccacaccccacctattgtctatatttctatctttaacagcacttcagtcctgccttaagttatagttatgtatagatacccattatactttaaatttttcagcagaaattatgcttttatcttctctgcagtgttatatgttggtgtgcaaaaatgttaaatttatttttcctaagtaccccatctgcttttcaactctgtcctctgcctgaaaagcctccctccagcccctacttccctcccatcttagttcacaaagtcaggttgatttgcccccagctgtcaaagcagactacctgtttccacatgtaactggttatgttctgtaaagttacaaaaatagaaaggttgaatctgtggcggccgggtacggtagctcacgtcctatagtcgcagcactttgggaggccaaggtgggcagttcacgtgaggtggggagttcgagaccagcctgaccaacatggagaaaccccgtctctactaaaaatacaaaaatattagccgggcgtggtggtgcatgcctgtaatcccagctactagggaggctgaggcaggagaattgcttgaacctgggagacggaggttgcggtgagctgcagaggcctcacctctaattgagacacaattatatattgttgatatatatatatatatatatacacacacacacacacactatgatggataaatgcatgagtttctgtgagagcattggaaaggagtttgtcactcaataggtgaagccaggctaagatttaagctgagccagggaggacttgaaggaatcatgatgagagagaaggtaagtggctttgccagcaatgaaacagctgacataatggtaaccagtcagaggagggcataactatgaaactggacaccttggttgtcaggttagaaggatggggtgtagggttggtaagaaaagaattcagggaagagcagcgatcagattatgaagaatttgtcttgagaaattacagaggatttaaaccagaatgttaggaatagttattctagcaagatgaatgtggaaagtgttagtgtgcatgtgatgagtcttgaagctggaaactaggtaacaggttcttaaatagttcatgtgaaaatcatgacagactaaggcagtggctgtggggctgtccgggagttctctacagaaaacatctaaaacttgaatgtgcaagtgagtagctaacttccaagcttcccatttctgtataatttaagcatgaaaatgagaacactgagatttgataggcatgtagaagtcagagtaagcaagagggcttgagttcatcgatgaacttcagtaactatccttgacttagtattggtggaaaccatttgtgaatttacagactccaaaaacaaaaagataatttagagtctcaaagtaagatttggggagatgtccattggagacagaagtggagagagggagaagttcatttgttgacatatttatgtatggtgcacctactgtgtgccaagccatgttagagatacagtgggagcaaaaccagatgtgttttctgccctctgactccagtggttgcagaattagcccaggaactagaattggatggagtcacacaaaccaaggaaggggattgtttgaggggggcactcagtcacatgtggctgaggccaaagagaatgaagatatattttaaaattctggatttggcaaaatttaggctagtctttacttttcataaacctctctcatgttagagcagcaaagaaaaaccagtttgccaagaggtcacgagattgggcagtgaggaatggggagtttagtttaaaagacaacactagatacttttggaagtttacctattctgtggttcccttttattgactaaatggtgcccttcattcatgaagcaagtatctatttagtgactactatgtgtcaaaagctatctaggcccagaaacttttaagtggaaaacaaaacaaagaccctgccctgacagatttcaatcatgtatatactgtatgtatgtttgtggaaggtgacataatagacaattgcagatagtgataagtgtgtaagacaaggataccacgagcgtaatagacagtggggatggaggaacctttagaaggttggttaagttgaatgataaggagccattcttttgtctttacctgaatgacttatcattcagccctttttgagttttgggttgcttgcagagtttaaccttgcctgtaattgaaacttaattttgtaatagcataacttcatgtaagaaaagcaaagcaatacattacagaattattttactgaagaacttgtttcagagaaagaggctgtttcacatttattagcacatttggattatatttaggtgttttatttttttttaaacaaaggagtttggatcataatacaagagaagcacagggcaaagacactgcataacctcaagaactaagaatggaaggactggccaggcctggtggtgcacacctgtaatcccagctactcaggaggctgaggcgagagaatcgcttgagcctggggggcagaggttgcagtgagctgagagaacggcgggcggcagagcgagactccatctcaaaaaaaaaaaaggataaaggaaggacttaagcaaaatcttccttgtaagtagaaggatgttttgacaagaaaagttgcaatggaaaaatggttctcatgtacacgagtatgtagaataagcatcgtgtgtggattggattcagatcaaaacattgcttttatgtttgtgtctttatacggtgggagtataccctggtgccccaggatgaagacttgacctgacccatgtatttttagattactcacagataacaaaaagtattttcatcatgattagttgcgaaaacagttttatttcaataggtaaaacgtgcagtcctatgtaatcgtcagaaggtaatcttaattatagcttgggtgtgctttaaactgcaagctggcagtggagggcacgattcctctgatttcagctttctccttatacttttctggagctgtgagctgcaagttaactcagtgggattaaagtgtagactggaggtacaaaaggtgaggagtgaggagatagggtagttcttccttggctggctggcttcataatccctgggccccgcagataattaaatcgactttttctgtctcaggcatttgtatgacctctttggaggttccctgctgggtagttatccttgtatctgatggacccatctcaatttaaaatactctgccaggttcggaggttcatgcttgtcatcccagcactttgggaggctcagaggtgccattggcttgagcccaagagtttgagaccagcctgggcaacctggtgaaacctcttctccattaaaaatacaaaaaattagccaggcatggtggtatgtgcctgtagtcccagctactcagggagctgaggtggaaggattgcttgagcctgggaggtcaaggctgcagtgaaccttgattgtgccactgcactccagcctggatgacaaagaccctgtctcaagaaaagtctgtaattctttcctaacccttagtatccagcctcagtcctgaggttttctttacctctgggggctattttatgccggctctctcctgagtgtcacacatctggtcctcaggaaacattctcacatccctggcctgaaaaaaacaatttcagggagatcgcatggcagcagccctctctgggctccccagctaaatggttgtacgaaacacatttcaaagctctctgaagggcttccttgaagttcctttcactgggtttcaaagtagaaggtagtaactcctttgtccaagaaggctgaattgagcacttaacaattctccaaagaaatttcttcattggtctctatcctagaccccttctgtatccttgatatggctgaggattctaaaaaatgaccagtcttacatgggagggctgggatataaaaaataaaataataaataatgataaaaactgaaaactgaccacgttcttggatatgttttctttgggttgtgtgtgtgtgtgagacttttgatagttacccaaagtaggaaaaatcccattctaataaggttatatttatgtagctctgcaaataaacatctagcaaatgtaaaaagtattttctttgccttaaaaatgattaaaattatttgaactcctgaggagtgttatatgaataaaattagtaagttatttggaggaaagttattttttaaaaagacaactggtaaaacagtacaggagaaaggccagcttcctcaagtgaggacagttgtttagaattgactgaggagcggccgggtgcggaggctcacatctgtaatcccacacgccttgggaggctctgaggcgggtagatcacctgaggtcaggagtttgagaccagcctggccaacatggcgaaaccccgtctccactaaaaatacaaaaattagccaggtgcagtggcacacacctgtaatcccagctactccgaaggctgaggcaggaggatcacctgagcccaggaagttgagactgcagtgagctgagattgcaccactgcactccagcctcagtgacagcgagactgtctcaaaaaaagaaaaaagtgactgaggaggaagaggccaggtggcaaatggaacagaatcaccaaagggtgaacaggactaaggcaatgtagtgtatggctcagctacgtcagagtggaaaaggtgttattagagcagaaactatggtccctgcgtcacagggaagcaacctacagagaagcagcagctccccaagagaggagagataagaagccagaagcctcagagtgaacaattgtcctattagggattgctctagagagagaaacctctgggaacgtacccctgtgaggcagcacagcacaatgcttttagaattgtatgagagttgatatatctccatttgttttgcaaaggcaaaaactaagatacagagattatctgttaaagttatgtatttctttggtaataaagatgctgacagtgttgctggaatgcatttctttaataaagatattgtacaatgaaata

SEQ ID NO: 33 - DNA, 1637 bp, Homo sapiens
gaggcgaaccggagcgcggggccgcggtcgccccgaccagagccgggagaccgcagcacccgcagccgcccgcgagcgcgccgaagacagcgcgcaggcgagagcgcgcgggcgggggcgcgcaggccctgcccgccccttccgtccccacccccctccgccctttcctctccccaccttcctctcgcctcccgcgcccccgcaccgggcgcccaccctgtcctcctcctgcgggagcgttgtccgtgttggcggccgcagcgggccgggccggtccggcgggccgggggatggcgctgctggacctggccttggagggaatggccgtcttcgggttcgtcctcttcttggtgctgtggctgatgcatttcatggctatcatctacacccgattacacctcaacaagaaggcaactgacaaacagccttatagcaagctcccaggtgtctctcttctgaaaccactgaaaggggtagatcctaacttaatcaacaacctggaaacattctttgaattggattatcccaaatatgaagtgctcctttgtgtacaagatcatgatgatccagccattgatgtatgtaagaagcttcttggaaaatatccaaatgttgatgctagattgtttataggtggtaaaaaagttggcattaatcctaaaattaataatttaatgccaggatatgaagttgcaaagtatgatcttatatggatttgtgatagtggaataagagtaattccagatacgcttactgacatggtgaatcaaatgacagaaaaagtaggcttggttcacgggctgccttacgtagcagacagacagggctttgctgccaccttagagcaggtatattttggaacttcacatccaagatactatatctctgccaatgtaactggtttcaaatgtgtgacaggaatgtcttgtttaatgagaaaagatgtgttggatcaagcaggaggacttatagcttttgctcagtacattgccgaagattactttatggccaaagcgatagctgaccgaggttggaggtttgcaatgtccactcaagttgcaatgcaaaactctggctcatattcaatttctcagtttcaatccagaatgatcaggtggaccaaactacgaattaacatgcttcctgctacaataatttgtgagccaatttcagaatgctttgttgccagtttaattattggatgggcagcccaccatgtgttcagatgggatattatggtatttttcatgtgtcattgcctggcatggtttatatttgactacattcaactcaggggtgtccagggtggcacactgtgtttttcaaaacttgattatgcagtcgcctggttcatccgcgaatccatgacaatatacatttttttgtctgcattatgggacccaactataagctggagaactggtcgctacagattacgctgtgggggtacagcagaggaaatcctagatgtataactacagctttgtgactgtatataaaggaaaaaagagaagtattataaattatgtttatataaatgcttttaaaaatctaccttctgtagttttatcacatgtatgttttggtatctgttctttaatttatttttgcatggcacttgcatctgtgaaaaaaaa

SEQ ID NO: 34 - DNA, 7465 bp, Homo sapiens
acactctgggcgcggagcacaatgattggtcactcctattttcgctgagcttttcctcttatttcagttttcttcgagatcaaatctggtttgtagatgtgcttggggagaatgggggcctcttctccaagaagcccggagcctgtcgggccgccggcgcccggtctccccttctgctgcggaggatccctgctggcggttgtggtgctgcttgcgctgccggtggcctggggtcaatgcaatgccccagaatggcttccatttgccaggcctaccaacctaactgatgagtttgagtttcccattgggacatatctgaactatgaatgccgccctggttattccggaagaccgttttctatcatctgcctaaaaaactcagtctggactggtgctaaggacaggtgcagacgtaaatcatgtcgtaatcctccagatcctgtgaatggcatggtgcatgtgatcaaaggcatccagttcggatcccaaattaaatattcttgtactaaaggataccgactcattggttcctcgtctgccacatgcatcatctcaggtgatactgtcatttgggataatgaaacacctatttgtgacagaattccttgtgggctaccccccaccatcaccaatggagatttcattagcaccaacagagagaattttcactatggatcagtggtgacctaccgctgcaatcctggaagcggagggagaaaggtgtttgagcttgtgggtgagccctccatatactgcaccagcaatgacgatcaagtgggcatctggagcggccccgcccctcagtgcattatacctaacaaatgcacgcctccaaatgtggaaaatggaatattggtatctgacaacagaagcttattttccttaaatgaagttgtggagtttaggtgtcagcctggctttgtcatgaaaggaccccgccgtgtgaagtgccaggccctgaacaaatgggagccggagctaccaagctgctccagggtatgtcagccacctccagatgtcctgcatgctgagcgtacccaaagggacaaggacaacttttcacctgggcaggaagtgttctacagctgtgagcccggctacgacctcagaggggctgcgtctatgcgctgcacaccccagggagactggagccctgcagcccccacatgtgaagtgaaatcctgtgatgacttcatgggccaacttcttaatggccgtgtgctatttccagtaaatctccagcttggagcaaaagtggattttgtttgtgatgaaggatttcaattaaaaggcagctctgctagttactgtgtcttggctggaatggaaagcctttggaatagcagtgttccagtgtgtgaacaaatcttttgtccaagtcctccagttattcctaatgggagacacacaggaaaacctctggaagtctttccctttggaaaagcagtaaattacacatgcgacccccacccagacagagggacgagcttcgacctcattggagagagcaccatccgctgcacaagtgaccctcaagggaatggggtttggagcagccctgcccctcgctgtggaattctgggtcactgtcaagccccagatcattttctgtttgccaagttgaaaacccaaaccaatgcatctgactttcccattgggacatctttaaagtacgaatgccgtcctgagtactacgggaggccattctctatcacatgtctagataacctggtctggtcaagtcccaaagatgtctgtaaacgtaaatcatgtaaaactcctccagatccagtgaatggcatggtgcatgtgatcacagacatccaggttggatccagaatcaactattcttgtactacagggcaccgactcattggtcactcatctgctgaatgtatcctctcgggcaatgctgcccattggagcacgaagccgccaatttgtcaacgaattccttgtgggctaccccccaccatcgccaatggagatttcattagcaccaacagagagaattttcactatggatcagtggtgacctaccgctgcaatcctggaagcggagggagaaaggtgtttgagcttgtgggtgagccctccatatactgcaccagcaatgacgatcaagtgggcatctggagcggcccggcccctcagtgcattatacctaacaaatgcacgcctccaaatgtggaaaatggaatattggtatctgacaacagaagcttattttccttaaatgaagttgtggagtttaggtgtcagcctggctttgtcatgaaaggaccccgccgtgtgaagtgccaggccctgaacaaatgggagccggagctaccaagctgctccagggtatgtcagccacctccagatgtcctgcatgctgagcgtacccaaagggacaaggacaacttttcacccgggcaggaagtgttctacagctgtgagcccggctatgacctcagaggggctgcgtctatgcgctgcacaccccagggagactggagccctgcagcccccacatgtgaagtgaaatcctgtgatgacttcatgggccaacttcttaatggccgtgtgctatttccagtaaatctccagcttggagcaaaagtggattttgtttgtgatgaaggatttcaattaaaaggcagctctgctagttattgtgtcttggctggaatggaaagcctttggaatagcagtgttccagtgtgtgaacaaatcttttgtccaagtcctccagttattcctaatgggagacacacaggaaaacctctggaagtctttccctttggaaaagcagtaaattacacatgcgacccccacccagacagagggacgagcttcgacctcattggagagagcaccatccgctgcacaagtgaccctcaagggaatggggtttggagcagccctgcccctcgctgtggaattctgggtcactgtcaagccccagatcattttctgtttgccaagttgaaaacccaaaccaatgcatctgactttcccattgggacatctttaaagtacgaatgccgtcctgagtactacgggaggccattctctatcacatgtctagataacctggtctggtcaagtcccaaagatgtctgtaaacgtaaatcatgtaaaactcctccagatccagtgaatggcatggtgcatgtgatcacagacatccaggttggatccagaatcaactattcttgtactacagggcaccgactcattggtcactcatctgctgaatgtatcctctcaggcaatactgcccattggagcacgaagccgccaatttgtcaacgaattccttgtgggctacccccaaccatcgccaatggagatttcattagcaccaacagagagaattttcactatggatcagtggtgacctaccgctgcaatcttggaagcagagggagaaaggtgtttgagcttgtgggtgagccctccatatactgcaccagcaatgacgatcaagtgggcatctggagcggccccgcccctcagtgcattatacctaacaaatgcacgcctccaaatgtggaaaatggaatattggtatctgacaacagaagcttattttccttaaatgaagttgtggagtttaggtgtcagcctggctttgtcatgaaaggaccccgccgtgtgaagtgccaggccctgaacaaatgggagccagagttaccaagctgctccagggtgtgtcagccgcctccagaaatcctgcatggtgagcataccccaagccatcaggacaacttttcacctgggcaggaagtgttctacagctgtgagcctggctatgacctcagaggggctgcgtctctgcactgcacaccccagggagactggagccctgaagccccgagatgtgcagtgaaatcctgtgatgacttcttgggtcaactccctcatggccgtgtgctatttccacttaatctccagcttggggcaaaggtgtcctttgtctgtgatgaagggtttcgcttaaagggcagttccgttagtcattgtgtcttggttggaatgagaagcctttggaataacagtgttcctgtgtgtgaacatatcttttgtccaaatcctccagctatccttaatgggagacacacaggaactccctctggagatattccctatggaaaagaaatatcttacacatgtgacccccacccagacagagggatgaccttcaacctcattggggagagcaccatccgctgcacaagtgaccctcatgggaatggggtttggagcagccctgcccctcgctgtgaactttctgttcgtgctggtcactgtaaaaccccagagcagtttccatttgccagtcctacgatcccaattaatgactttgagtttccagtcgggacatctttgaattatgaatgccgtcctgggtattttgggaaaatgttctctatctcctgcctagaaaacttggtctggtcaagtgttgaagacaactgtagacgaaaatcatgtggacctccaccagaacccttcaatggaatggtgcatataaacacagatacacagtttggatcaacagttaattattcttgtaatgaagggtttcgactcattggttccccatctactacttgtctcgtctcaggcaataatgtcacatgggataagaaggcacctatttgtgagatcatatcttgtgagccacctccaaccatatccaatggagacttctacagcaacaatagaacatcttttcacaatggaacggtggtaacttaccagtgccacactggaccagatggagaacagctgtttgagcttgtgggagaacggtcaatatattgcaccagcaaagatgatcaagttggtgtttggagcagccctccccctcggtgtatttctactaataaatgcacagctccagaagttgaaaatgcaattagagtaccaggaaacaggagtttcttttccctcactgagatcatcagatttagatgtcagcccgggtttgtcatggtagggtcccacactgtgcagtgccagaccaatggcagatgggggcccaagctgccacactgctccagggtgtgtcagccgcctccagaaatcctgcatggtgagcataccctaagccatcaggacaacttttcacctgggcaggaagtgttctacagctgtgagcccagctatgacctcagaggggctgcgtctctgcactgcacgccccagggagactggagccctgaagcccctagatgtacagtgaaatcctgtgatgacttcctgggccaactccctcatggccgtgtgctacttccacttaatctccagcttggggcaaaggtgtcctttgtttgcgatgaagggttccgattaaaaggcaggtctgctagtcattgtgtcttggctggaatgaaagccctttggaatagcagtgttccagtgtgtgaacaaatcttttgtccaaatcctccagctatccttaatgggagacacacaggaactccctttggagatattccctatggaaaagaaatatcttacgcatgcgacacccacccagacagagggatgaccttcaacctcattggggagagctccatccgctgcacaagtgaccctcaagggaatggggtttggagcagccctgcccctcgctgtgaactttctgttcctgctgcctgcccacatccacccaagatccaaaacgggcattacattggaggacacgtatctctatatcttcctgggatgacaatcagctacacttgtgaccccggctacctgttagtgggaaagggcttcattttctgtacagaccagggaatctggagccaattggatcattattgcaaagaagtaaattgtagcttcccactgtttatgaatggaatctcgaaggagttagaaatgaaaaaagtatatcactatggagattatgtgactttgaagtgtgaagatgggtatactctggaaggcagtccctggagccagtgccaggcggatgacagatgggaccctcctctggccaaatgtacctctcgtgcacatgatgctctcatagttggcactttatctggtacgatcttctttattttactcatcattttcctctcttggataattctaaagcacagaaaaggcaataatgcacatgaaaaccctaaagaagtggctatccatttacattctcaaggaggcagcagcgttcatccccgaactctgcaaacaaatgaagaaaatagcagggtccttccttgacaaagtactatacagctgaagaacatctcgaatacaattttggtgggaaaggagccaattgatttcaacagaatcagatctgagcttcataaagtctttgaagtgacttcacagagacgcagacatgtgcacttgaagatgctgccccttccctggtacctagcaaagctcctgcctctttgtgtgcgtcactgtgaaacccccacccttctgcctcgtgctaaacgcacacagtatctagtcaggggaaaagactgcatttaggagatagaaaatagtttggattacttaaaggaataaggtgttgcctggaatttctggtttgtaaggtggtcactgttcttttttaaaatatttgtaatatggaatgggctcagtaagaagagcttggaaaatgcagaaagttatgaaaaataagtcacttataattatgctacctactgataaccactcctaatattttgattcattttctgcctatcttctttcacatatgtgtttttttacatacgtacttttccccccttagtttgtttccttttattttatagagcagaaccctagtcttttaaacagtttagagtgaaatatatgctatatcagtttttactttctctagggagaaaaattaatttactagaaaggcatgaaatgatcatgggaagagtggttaagactactgaagagaaatatttggaaaataagatttcgatatcttctttttttttgagatggagtctggctctgtctcccaggctggagtgcagtggcgtaatctcggctcactgcaacgtccgcctcccgggttgacaccattttcctgcctcagcctcctgagtagttgggactaccagtagatgggactacaggcacctgccaacacgcccggctaatttttttgtatttttagtagagacggggtttcaccatgttagccaggatggtctggatctcctgacctcgtgatccacccgcctcggcctcccaaagtgctgcgattacaggcatgagccaccgcgcctggccgctttcgatattttctaaactttaattcaaaagcactttgtgctgtgttctatataaaaaacataataaaaattgaaatgaaagaataattgttattataaaagtactagcttacttttgtatggattcagaatatactaaattaactttttaaaacacaacttttaaaaaatgtatcaaaaataataaacgtgttctgatattttta

SEQ ID NO: 35 - DNA, 4380 bp, Homo sapiens
gcatatcttgagtagaacttaacatatcttgaatgggatatttttttcttttattcttatgagtggtctcacacaggaccaaacagcaggccagcatagcaccacgtgatctgagcttgtttttactctctcctttttcataaacagagtcccagattaatgccagtagttgattttgggtctttggggtagtgaagcttgtggatttgacttctctgattccttttgctgaccttgagtggattgtatctttcactgttaattataataatttaaaaattgagttctacttactggacatgaatctctgcacttgaaagttaacatattaaaagcatattttttttcttccttggttttcttgttcatgtggataacccagagaatgcctgaatctaaggtgccatcctctgagaatcatcgcccagaaatgtgctctagctgcaatgttcctcttcccattggagatagcagctccttctctgggagttgttccagcagtccagaaaggatagtttctcaaacttcctctgttgagaacccattggagaaccagaaaaatgatcaaaataattcagatactaagatctctgagacagagacccttaaatcatcacagaattttcagactctgccttcatctccacttctggtcccccaagaatctttggcctcttctgaggtcaaagagaatttacgtatagattcttcttcagcttcacagcatggacgggatgccatcctctatctccagacacaagtagctgaaatgtcccgagtgatacgtgatctgcagtccaggagctgttttagatttcatcattctaggccaagtgagaactcctcagttccttgggacatctccacctctaaagaggaaaatttatccacagttgaagaagaaactgattacaaatcaccatcagctgatgacaaagggcagccatctgaccccagccaatctagtttcacaggtcttttgaagagaatggaacaaagaggtgttataaaaagggtgacattacaatctgaagcggagtcatgtgaagggaaacctgattgtgtgacttctaaaaaacgtttggttcctccattgcatcctcttctgagaattgccaccactgaggtttttaaagaccctgctgattgccatccttcttccttcatgggacacagggtatatcctgtggccaaggacacctctcctttccaaccaaacccaccagctgaaggccccattgtagaagcattagaacacagcaaaagaggaaacacaacatcccctctagattctacctcaaaagaaatggaggtcatgggttgtaggttttaccacgctgcctccattgcagcccgagctgctagctacatggcctatatgactcaatatcagcgtaaactctgggaagacatggaagatctggttcatgacccagaatttgatcgtggaaaagcaagatgcataatatctgatggtatggatgcaggcctttggcaactttgtactactagggacataatggactctgtagtcagagttatggccatggccatagactatagacggcaggcctggcttcgacttacatctctcactaagaaaacccaggagaagatctcccacttgccctttgatggtacttccctttttggacaagatgtgaaagctgttgttgcagaagacaacaatataaaagaaaatgactataaagatcacaaatactataatcagcatcgatacttttatagtcatgatcagaaagcacattatcacaatagaggatactccaaaggggattggtacaaacctcgaaaccacccctatagatatagaaagaagggagactctccagaacgccatgggtacaagaattaataacctgtttaatgttcagcagagtagtcattcaagatcctaactattttacttgttcctccttgtacaaataggatctacaggtaggagatcatctcaaaaactggatgcatgtctggaatgatcacagctgacatttgaattctagacttttgaaatgaagtatataataaagaaactcatgacttggccaagtgagcagtggagactttcttgaaagggttggacaaatgtttatcctttatttctggtccaaaaataagtgtggaggaggaccactcaggaatctgaatcctcttgtgattaaagaaaaatataaagatgtgttcctcaggaaaatcttatttgtaaactgaggactagcagattttgaatctagaaataatactagatgtctgtttactaagaccagaggtaaatccttaacttttaggttatcagtgcttccttgttcaggcttcagtttgacagatcttcacaaaatgacacatctgttaaaatgtctttatgtcaagatggtcaactcaccaagagtccgtactactatcaagctctgtgagacttcagaatcagccatgaagctttgtgtcaactggaattcaaatcaaattttgccaaatccagtttgcttccccttggaatggctagatgtcgcaggtctattatggacaccaactggaaaaagacttctacctgtaacatctctgtagaaattgcacagtaactatcttcatcaagactttgatggccaccataccatcactactcataaagctacatgtgagagaattgtttgttgttatcaatcctaatagtctttgacctatcaagctctcgtatcaagctgtaagactgagtcatggtagtctctcactgtaagctgggcctttcaccaagatggccttcttaaacaacctaccttctaaacatttaattcttttgagcttgatagtgcatcacactctaaatacaaaaaagatacgcacatcagtgccctggaaataaaggatgttacacgatccaggcatgcaaatctgaactcctaagaccaagaattccaaacatgcctgacaatcttgtccccttattgtaataaagagggataccatcagtctagattttattgagaatccttaagatttaaagcatagctgtggatgtggtgaagagaacaagccacacagctctgtttctggatatctaagtgatgatatccattaatgatttgaaaggctgaaatcaagatttaagtgatacgctcttggttaattggttacttaatttagtcagattcttagtgtaagagacagcttatctttttgctcccaattggtcccattaatagtttttcaccatactggaactggcagcagatacctcaattatatgtcccacagtatcttctctttagactcaaggtagtggatgtatggtatatcagcccttagatccatgtcttcacagcatgacatcaggaatggagaatatgtcaaatttgaggggtctgaatacatcacctagtattatttgcttggcagccaaaaacagttgtttttattgacagacttaattctgtaacttctgcgttttttcatctgcttgatcaaggcattttggatgtactgctaatggaatatggcactgttttacggtttatgtggcttctgttcttgccacagttgttgcacagtggtaattgatgttttctctggtgccacactttttaataatctattggaagctcattcctcctcccccatcataaccatattcagcacccatttttaaatctacttttcttccttatttgtgctacagaggttgatggcgtaaattttcctacttggaagaaattactttatcagttaatttcagggtactgtattgatcttgtttgtcctatttgtagattaaacttgaactagtcttaataaaggggatattgttttgcaaatttagcccagtcatatcaagagttaatatttatcttatttttctgtattttactcaaaattttatttccacttctgtagaaataggtccatgccagtgttctctacaaagtgtctttcaaactaaactctagaagaatatcgattacctgaacagaaacaaaggcctaagaaatcatacatttttgtagcttatgtgtattgcaccaatcaagcaatcccatgtgctcttgatattggcactgtagttttatcttagaggacttgccactggagaactcagtggtgagagaccttggaaatgttttatgtggctgcacataagtgtttctgactagctaaggctacttcagacttttcactttccatttgtccccttttccttccctgaattagatgctatgtcataaacttggtggtttttgaaatactcttatttcaaaccttaaactaaaccgaaataagttatgcctgagaatgcgtttgtctgaaacgattttggcacttccctttaatatgcttccccttccctttgccttttaaattgtggtt

SEQ ID NO: 36 - DNA, 2001 bp, Homo sapiens
gaagggcggcgcgcttaggcaggcggtggcgcggctggagtgccgcggggagggctgtgccggttgctttctgcagccgcatctcggccagctctcctcgccgtccccggggcgctgtgcgtctccagtccgggaccgaagccgcctgccgtagcgggcggccagatccgcgtcccgcctcagcggccggaggacatgcgggagagagaatgagccagagggacacgctggtgcatctgtttgccggaggatgtggtggtacagtgggagctattctgacatgtccactggaagttgtaaaaacacgactgcagtcatcttctgtgacgctttatatttctgaagttcagctgaacaccatggctggagccagtgtcaaccgagtagtgtctcccggacctcttcattgcctaaaggtgatcttggaaaaagaagggcctcgttccttgtttagaggactaggccccaatttagtgggggtagccccttccagagcaatatactttgctgcttattcaaactgcaaggaaaagttgaatgatgtatttgatcctgattctacccaagtacatatgatttcagctgcaatggcaggttttactgcaatcacagcaaccaaccccatttggcttataaagactcggttacagcttgatgcaaggaaccgcggggaaaggcgaatgggtgcttttgaatgtgttcgtaaagtgtatcagacagatggactaaaaggattttataggggcatgtctgcttcatatgctggtatatcagagactgttatccattttgttatttatgaaagtataaaacaaaaactactggaatataagactgcttctacaatggaaaatggtgaagagtctgtgaaagaagcatcagattttgtgggaatgatgctagctgctgccacctcaaaaacttgtgccacaactatagcatatccacatgttgtaagaacaagactacgtgaagagggaacaaaatacagatctttttttcagactctatctttgcttgttcaagaagaaggttatgggtctctttatcgtggtctgacaactcatctagtgagacagattccaaacacagccattatgatggccacctatgaattggtggtttacctactcaatggatagcagcacgaggactgctgtactgcaaaaaaagaagaccaaaagattacagtggaccatgggatacagaagccagcatggcagacagaagaaaaatagtttgggaacatgtaactattctaagtggaagttttgttgtaggaattatagtaatcacaccacattacttggcctttcggtaatgtgaaaaaaaaaaaaaaacctcagagcctccaaggaaatgcctttagaagcactcctctctcaaaattgccattttctctaccatgtcccccagacacagttgggttttgttgatttatggcagtcttctaaacaaagccatccttaattttacatactgtattgtaactatccaaagatagtattggcagtcataaatttataacttctggcctttgtttaattccagtaaaataacagcaatgacaatgagatcgtcagtattattttcacatttccctgagaggacctggcacaatattttaaatttaattatttggcagtagtcactgtttttgacaaccaatgaaatagcgtctaaatatcttgtatattttttagcatcaaaatgttttggtttccactgctgacaggtgcttgttgtttagcctaatgtggatatttaaattgttaacataccaaacacacatggtaatagtttgggacaaaataactagtaaaatgttgatttctcggctatttcactgactgcggcatgtcctcgtgtcttctctgattttgtggtacatgaatgaatgcatttatctttttagtgacttactagttacgaacttgaattatcacctctttgtcatacttaagtatcatttacataaagtgtaaaagattttttcacttt

SEQ ID NO: 37 - DNA, 1377 bp, Homo sapiens
agcgggactccgggccccggcggcggcccatggggcgggaggcgtgaggccgctgcctgtccggggctcggggggtggggggagcggggcggggagatggataaactgaccatcatctcaggatgtctctttctggccgccgatatcttcgccatcgccagcatcgccaacccggactggatcaacaccggggagtctgcggtctcaccttaatccagctcagttctgtgtacaaaccatggaggttattcattcaggtgaaataaatgggttacttctgccagattaatctgggaagaaacagagcactcactgtgggcctcgtgcgacagtgtcaaacaatccatggacgagaccggacgtgcatccctccccggcttcccccggagtgggtcaccacactgttttttatcatcatgggaatcatttcattgactgtcacatgtggtttgctggtggcttcccactggcgaagagaagctacaaaatatgctcgatggatagcattcactggaaagtgtgtgcattcttctcatacctaagaaaatcactgtaaaatctgctgaaaactatttttaggttttatttgcacaagactgaattagtttgacatttttggaagctcctattgaacatacccaaacatctgtaaacatgaaaaatcttcaatttattaaaagcaaacatttcagtatgattctttccaaagtttgctgctgattcttccttgtgtggccttttgaggagcctcctggggaattggaggattaagacatgccactatgagaagattataggaaaaacaccaagactagaggactctgggttctttttatgcaaagtcaactcttctgggtcacagttacccagcaacaaaaataaagaatttccccatggactccagatcctttactactgaactcacagggctgtaacactgttactgtacagagaggaccaggacgatgccagcaccccgtttatcctgagtgaactctccggaggcctcttcaagcttgtgggttctctgctgtcttgaagccatccatccatttgataggttttgcaaagacttggtcctgccaagatggttttaatcatttctgctaaaaggaatggactcgaggatttgatctcattttagatgcagttgtcctcacttggccattttacagcactttagtaaatatggccagtgtatttggtcactattaaatcaatccccattcattatctgtcagggcaactcagtgaactaaatactatgttctgacctctggcactctttctcatgttgtttaaatatttaatattgtctaaggcaattcaagtattttcttaaataaaaaatatgaaaacccaaaaaaaaaaaaaaaa

SEQ ID NO: 38 - DNA, 8811 bp, Homo sapiens
taatatatttagtttttttaaaatcatggtaattgattggaagatttatttttaatagctttgccttttttgcagagtgcaaaatttctaaattataacttatgtcataaagcaaaattatatttggtatcaccataaatttctattctgaatggtgagaacagataatttgaatatttctcacctgtgagtctatattagtaagctttttattttaatgtactgtaatgaagtggtcacgagtagttacctcggctcaaaaatgtcatttagtttgttaaactattttcacaaccatcataagcataactagataactgtccattcccagcagttcagtttagtctccattgtgtatttaaaggttgtcgcagagcagcacattgacttcctcatcagccctttgacaaggaagggaaagtcgtgggtagtcaatttgaactttttctgtctacttgtcccctcatgttagctgcttgaaattcttcagttatgatacaaagctgagtttgcagtaagttgcacattttattgtttgcaattttctgttttatgtgcatttaaaagcccttctctgctttctagtaaggaggcatgaaattatcaggaatgttgctagttacagcttcacaccaaaaactttgagtaaatacattttcgtttggatgcccatgatgaaagctgaggaaagtggttgaggaattatcaacaacaaacttttcctcttattttatctagttcaaaacagatatcaaagtttgcaatttgctttgctcttgctgtttcttatgagtccctttttggaagagaggagaacatctataagcccagagagatctgtgtttttcttttacttaatagagccattctcgtctattagtaggaactttgctattaatatgtatagaaaggaatgaagtggcttttactccagaaatatgaaaattagtatcttttaaaatagcacttatgctatcacaaggcaatactggaatgaaaaacaaatcttataaggtcctaaataggtagaaactagcttttattctagtgttgaacccaggagaaatagtggcaaagaagtttcactctgtttctgcagttctttgggactatttataaaggccagttagattgtgttactgtgatttaatttacaaagttgctgcagttaatggatacattctgtgctctgagaatctgaattccattctaatgtgtgatattcactggctatgatcagtagtatctgaagaaaagatgggctttttctcctttactctctctacataattattaatattattttaattaaagtacttaagacattgttttttcttctgtaaaaatggcttagcaatttgcacatctgggtaggttatgtagctagtaaacaactcaatagtaagtagcaattatacttaacccaccaagtgacagactatgcaatggaaaaattttctaattatcgtcacatagcttagacagcaaaggattattttctctggtgacctaccatgtgtgatataactgctttataaatgacttcctgagcaatttcatgttggcaggcagtgtggtgtgtctagtgcccctctatgagaagactataatttaatcagaaacaaatagtaggcatggggagcaagttggaaagtgaggttattattttttttccttaaaattggtgttactgtctttagtggcttgaggctaaagaaagctgatactttatctttgccaaataattatttataagatttatttttaaataagcccaatctctcacctgcagttaagaatcatcattttctgtgactgacactaaagctcttccttatcagagcttgttctcaatctgtgatcacagtccacagtggcaaagacaactctttgattaggaaggaaaccatgtttgggatgcacagaggtgccctgtccatacggttttcttcttacatgaaagaattgacctttctgttgacctataccattctgtttttataaagtgggattagaatttgagcatatctagtaaatgctgtgtggtcagtccgctgatgcttgcccgccgtctttgccgtgccttggcatcctaggggtgctggtgatggtcagtgggcatcatcggtcagcagtgcacgtgtaaggcaatctcctctcctccaggttagttcagaaggtcgctatgggttggtattgcaaaaagatgagtatatgaacactaaacttattaagaggtttgaaattcattaaaaattagttttcagtttcttcatctttcttttcagacttctttaaaaatactgttcttaatctggtatatatagaaatctaatattatggtcttttaaatggtcaacagaactctccagtttaatgaggcaatttagaggattccttgaaagaaaatttcatcatactgaacagtcctcatttgtatctcttttattaccagtatttacattgttccaaggatttttttcctgacaaaaaatatatttctcgggagtggagagtttttttatatatatatatgaaagaacatagatgtttccccccgcccaatacattaactgaatcttcactggcattctgtagaaaagttaaaacagtttaataatgtcttaacatctttatacattttcctatattctggaggaaaccagaatcatgtttagtagattaaagtaacattttaaatactacctttccaataatttgtaataaaataccagtgaaggacatgtttggatatctgttaagcatttttccctgactaatgaattaggaaagaaaacataaaacataaatgaatagttatgtctcttctaataaacagtgtcattaatgctgcagttgtgggtcaaacttagggagccttatttctaaatagcaaaaattctgttttcacttcagcccttattttttttgttagtttttctctgcactgtgatacagagctaataagaggaaatgtgacgtttcagagagagagcaagcaaattgggtatgacttttttaccctatgttccccaatactggggatgtttggctactttgaatagcagtttttagtgatctaaagtttagatcaatactcgtataagagaaaaatctaactctcagtgagctccatagggcagcacagctttccatcttctctttcgccttcttgcgtctgcccaccacagtcccgaagaatgcacacgcacatatgatctgtacccatcccgcccgaagagtcatagaatcctcttctttcacttgtttcttttttcttcgtttgtttgtttttgtttgtttgttttttaagctggggaccactgaagtaagctctatatgcacccaaagttccccttggaaaaattttcaacacgcagtgcagaaggctccagtgcagctaaatgccacaccattggttctacctgggggaatagactgatttgccctaaaatgactccaacctgcatcattaaggtacagttggctccagtggattagtgctgaaatgatgggaagtctgacacttgttgacattgtcttcatctgtttggaagggttgaatctgttcctctcaacagtgatagttcttttcactgtatagtattgagtatgtctcagggattccttgtggaaattagggcagtttttaaaataagaaaatagttttaaaagaaactaaaggtgactcatcattgaagagagcggaagaaagaggaaacatttggttttgtagcccacagtgtcttgcataggactttttcctttctcctccaggctctcatctcagcttcagaatacagaatcctttcccatcacgcacagctttaaaacttttatttaaaaatttccttccccaatgagctttcagaatacttattgtagattttaagagaaaaggtatattaatttatgctattaacatcacctcataaattataagttttatactaaagctgtatcgagtgtaatgaattatgttgcctatgtgtttaatagctaaatatatatgagctttttttttttttttttttgacaaaacaaactagtgaagcacctttttacactggatctctgccgtgtcaaggtgtatagctatcctttgctaccttgcagatatataaaataaaaggatatcctggggcctcaaaatgtagaacacctttagaccatttataactgttcctagaactgttgagaatcatgttctttagtaaatgatctgtggtttacacttaagatggctagaagcttagttacagggtacatagaaatacatagatcaagtaaaactccaactactgtagctggaatttgtaaactaagtttgtaagacctcttttatttcctatggagttattctttaatttacagtttattctgtaagttgggaagtaaaatagagaaaataataaatctagatgttctcagtgtcttattcaggaactttttatccctcctcactaaggaattcccactgtgactttaaaatagaactaaattacttgtgtgcatgtatatgtctgtattttttacacacatgcaaaaatatacattgggggcacgtgtgtgagagatatgaatgtgtgcttatataaaaatagataaaggtaaccgaatgtattgtagaaacatgatttatttagttgagggtattggagttactttctcattgtctctgttgtataaatacaccaaattaatcattatgttatcttatgttaaaaggctagctctgatatcatgtgcattttatgttaacctttggattaacttatattatgctatgttcataaaatgacatgagaaacaggaggttctaagatcagcctctcactttcgagcataaaaataagagagggagacagacagccccagacatgagctgtgtttatctattgtggtgatgggaccacagatctattgaatcttttttatgttaattatagatttctttatattcgagtaagaaaatattgttgatcatcttttcttggtgaagttaagaaaaagtataggcctttcataaacaatttttggaaggggctgctttgtttaaggagttggtgggatcatttcaccgtgcatatttcaaagctggggtgatttcatttatttccaaaatttttcaaaaaacttttactcagttctgctgttatttattaacttaagagtgctcccatccccatattttagctataggaaaattgtgctacccctgattcatatggaattaaaaaaaaatacatccctttattttgagttttaagttgttattttgctatacatttattactggagtatctggtggtctgaaatagtcaaaagtagagttggtattaaatgttccaatgacatttatttttaatacttaaaaaatcatgtactttgaaatatgtcaaagcaacttctgataatatacctgaatttgtagttgtctcttgagcatcatttacttcatcttagatatagtgaagatctaggaaagctctatatgctgttcttttctacagttgtatttttgcagcatctcctggtttcattcactcttgttttgggattttttttttagatctgcatatttcttgtacatatgcatgcaaatgaaagaagggagtttgtactggtgccatttctcccttcagttgctggttaatgggatttgctagaaaaaattctcccggttgaagggtgaaaacagacccttatgtgtatatctgtacagagatgtgtatatgggatgtggtggcactttgctgaatgtgaacttgccttgtcaatggaaagattgaaaagtattatgtttatttatacatttgtataaatctatatatacacgtatgtatatgtgtgtgtatagataaagctatatacatatatttcccttaaaaatgtgtgtgtataataggtaaacagcctttgttaagcaagattaatgtctatggaaagttctggattattctgtaagccagaggaggtgacagtctagagtacatcatcagaacatactaaaatggaagtcctttggattatagttttgtttatggatattacacaatgaatgcttgtctgaacagttcttacttgccagttccactattcttcatcttcaccaccttctactggtcagtctttcatcacttaaaaaaaaaaaaaaaaatcacacatcattgtggtttttttcccccttaattctgtctcttctagccagaagcatctggcttaagcatatttcatcaacttctctgttatttcttttaaagatctttatctctgaaattttcccagaagatacaagttttggtaatattatcaataggaattttgagacttgggcattcatctttgtctcaaaaacaaacagaaagccaaccttcaaataaaacaaatttgaaagttttagctcaataatttggggacattttacttaaattacaaaagaacataattatgattttatgatcgatattagtgttaggtttatttccacacttactgtcattaatttgtcatttacatatttttatttgctttgtagtttaatcataacttcaccatttacattttaatggaaagcatacgaggtcacatgttagcctcttgaattctgtaactaactcatttttctcatgatgaaactgctttgatgaattcctgtgtgatgaattctgctatatttccttttgacttttctcagtttgtgacattctgtattaactttgctgcagctctctagaaaacttgcatccctatatattgtgcctttaaagctcttatgcacacacagacaaaagtgtatatatacatgtcagagcatgtgtacatatgctttcgtatgtactcacacagtatgtctctagtatatattgtgggagtagatatatagatattcaaaggcaatgaaatattgctctccagatatatatgtatataaatagtgttgatataactgtatatacacatgtatatgtgtgagttttaaatggcaatcttttacatttagcaaaatgctgcccctactggaatattgtcactgcagtggcagttgtatgtaatgatttaaaatacattatcaaaagttatttaaagaacatttaaagtctcatctaaagacatccacacactatttatttatcttccttttccttttattgttgtgtttttcttaactgaaagggagactgtcattttaaaaatgccatctgtcccatgagagtaagaaagagctggagattcacttgaggagctttgtgcatttttcctctctctgaagtggagatgttccacagaccagactgtttatttcacttataaagcaatcctaatatttccgttagtgtatgtcagccaccatctcctagatcaacttaattcaccaatttgcctcctcctttcattaataaataatgattattgagatcattttgcctgggggaagttaactactcccatgctgcagggaaatatatcacctaattgttattttgccttgttcaaaattcaaatttgaaagaaggcagctctctcatgaagctgtcttaagcacattttagttaagggccctcccaaactcttttttctttctttctttctttctttttttttttttttgcgagttccaagttgcatgtgcttgaaatagatttaattcttattccccacagtttaggtatttttcattagtacatcaatttgacacactgaatgcaagactattaaggaagaacgattaaatattattttattttgcgaagagttgacagcagattacatctcaagaacttgcagagagaggaaggtagatggacaatcctaaattgtaagatgttacaaaaaacagtgaagtaagagtactcctgaagactaaaatagagaggctggggtttgagccattttactgagtagcttagctggaacctgatatcagaagtagcctttaacaaaaagcctcttggcaattgtatggtactaacaactagagtactgaagtgtaagttgaaaccaagttgcagtgggaaatcaaaggtgaggtagcttatttgaaaccagcaaatgagacaggttggacagttttaaaatctcttctaacaaagaaactgcacggtagcaaggactagcggttctcaaagcccttctttttcagtgttctcattcaccttggcacccaagtatgtttaacaggccatgcattaaaaataaatacaaaaatataaaagccgcttaaagggaacttacaaactgacaatctctcctctgtatttgtgttcatagtggctgggagtttaattatatgcacaaaagttaggagccacttgtttctgcacagactgtaggagcaagatgaggagatgggcaggttttggtaagagcccccagttctggtggacaggcatacttgtggcattgggtgcggcattgctgggaggaccacgtcttgggaggcgattgacttttggtttgtaatttccctttaaacaagaagagatggctcacattttccatatatatctcaatgaatgtactgtattactgttttaaaaatttgatgaaataataatgaattggtctccttttgttatctggtccttgtttaatttgtttaagggtttttgtatacaaaagtttacatttttatgtatatttttcttgtgtaaaaactgatgtaatatgtgtatgaaacactgtatgtattatctgtatatagtgtgacaaaatcatttttctttctttcttttggatgtattaataaatcttgctgtgaagtaaaaaaaaaaaaaaaaaaaaaaaaaaaagaaaaaaaaaaaaaaaaaa

SEQ ID NO: 39 - DNA, 1967 bp, Homo sapiens
gtggggtcgcgttgccaccccacgcggactccccagctggcgcgcccctcccatttgcctgtcctggtcaggcccccaccccccttcccacctgaccagccatgggggctgcggtgtttttcggctgcactttcgtcgcgttcggcccggccttcgcgcttttcttgatcactgtggctggggacccgcttcgcgttatcatcctggtcgcaggggcatttttctggctggtctccctgctcctggcctctgtggtctggttcatcttggtccatgtgaccgaccggtcagatgcccggctccagtacggcctcctgatttttggtgctgctgtctctgtccttctacaggaggtgttccgctttgcctactacaagctgcttaagaaggcagatgaggggttagcatcgctgagtgaggacggaagatcacccatctccatccgccagatggcctatgtttctggtctctccttcggtatcatcagtggtgtcttctctgttatcaatattttggctgatgcacttgggccaggtgtggttgggatccatggagactcaccctattacttcctgacttcagcctttctgacagcagccattatcctgctccataccttttggggagttgtgttctttgatgcctgtgagaggagacggtactgggctttgggcctggtggttgggagtcacctactgacatcgggactgacattcctgaacccctggtatgaggccagcctgctgcccatctatgcagtcactgtttccatggggctctgggccttcatcacagctggagggtccctccgaagtattcagcgcagctcttgtgtaaggactgactacctggactgatcgcctgacagatcccacctgcctgtccactgcccatgactgagcccagccccagcccggggtccattgcccacattctctgtctccttctcgtcggtctaccccactacctccagggttttgctttgtccttttgtgaccgttagtctctaagctttaccaggagcagcctgggttcagccagtcagtgactggtgggtttgaatctgcacttatccccaccacctggggacccccttgttgtgtccaggactccccctgtgtcagtgctctgctctcaccctgcccaagactcacctcccttcccctctgcaggccgacggcaggaggacagtcgggtgatggtgtattctgccctgcgcatcccacccgaggactgagggaacctaggggggacccctgggcctggggtgccctcctgatgtcctcgccctgtatttctccatctccagttctggacagtgcaggttgccaagaaaagggacctagtttagccattgccctggagatgaaattaatggaggctcaaggatagatgagctctgagtttctcagtactccctcaagactggacatcttggtctttttctcaggcctgagggggaaccatttttggtgtgataaataccctaaactgcctttttttcttttttgaggtggggggagggaggaggtatattggaactcttctaacctccttgggctatattttctctcctcgagttgctcctcatggctgggctcatttcggtccctttctccttggtcccagaccttgggggaaaggaaggaagtgcatgtttgggaactggcattactggaactaatggttttaacctccttaaccaccagcatccctcctctccccaaggtgaagtggagggtgctgtggtgagctggccactccagagctgcagtgccactggaggagtcagactaccatgacatcgtagggaaggaggggagatttttttgtagtttttaattggggtgtgggaggggcggggaggttttctataaactgtatcattttctgctgagggtggagtgtcccatccttttaatcaaggtgattgtgattttgactaataaaaaagaatttgtaaaaaa

SEQ ID NO: 40 - DNA, 6991 bp, Homo sapiens
atgggagctgccgaagcggcaagaacagcgtttccgtccatcgagcgccaggtcaccatcgactattcagccttgcaggcgcctctggcgggcttcactgagatccgctctttcggtgctcgactcgcccgtgctgctgccgccgccgaaggaggggcaaagctcaagatggcggacaaaacgccaggcggatctcagaaggccagttcaaagacgagatcatcagatgttcattcatctggatcttcagatgcacatatggatgcatctggaccctcagatagtgatatgccaagtcggacacgacctaagagcccaagaaaacataattataggaatgaaagtgcccgtgaaagcctttgtgattctcctcatcagaatctctcaagacctcttctggaaaacaaacttaaagcattcagtattggaaaaatgagtacagctaagcgaactttaagtaaaaaggaacaggaagaattaaagaaaaaggaggatgaaaaggcagctgctgagatttatgaggagtttcttgctgcttttgaaggaagtgatggtaataaagtgaaaacatttgtgcgagggggtgttgttaatgcagctaaagaagaacatgaaacagatgaaaaaagaggtaaaatctataagccatcttcaagatttgcagatcaaaaaaatcctccaaatcagtcttccaatgaaagaccaccatctcttcttgtgatagaaaccaaaaaacctccacttaaaaaaggagagaaagaaaagaaaaaaagcaatttggaactcttcaaagaagaattaaagcaaattcaagaggaacgtgatgagagacataaaacaaaaggcagattaagtcgatttgaacctcctcagtcagattctgatggtcagcgtcgttctatggacgcgccttcaagaagaaatagatcatctggtgttcttgatgattacgcacctggctcacatgatgtaggagatccaagcactactaatttataccttggaaacattaatccacagatgaatgaagaaatgctgtgccaagaatttggaagatttggaccgttagccagtgtgaaaatcatgtggcctagaactgatgaagaaagagccagagagagaaattgcggctttgtggcctttatgaatagaagagatgctgaaagagctttaaaaaatttgaatggaaaaatgattatgtcttttgaaatgaagttaggttggggtaaagctgtacctattcctccacatccaatatacattccgccttctatgatggaacatacgcttcccccacctccatccggactgccttttaatgcgcagcctagagagcggttaaaaaaccctaatgctcctatgttaccgccacctaaaaacaaagaggattttgagaagactctgtcgcaagccatagtcaaagtggttatcccaacagaaaggaatttgctcgccctgatacatcgaatgatagagtttgttgtacgtgaagggccaatgtttgaagctatgattatgaacagagaaatcaacaatcctatgttcaggttcttatttgaaaaccagacaccagcccatgtttactataggtggaagctttattctattctgcagggagattctccaactaaatggcggacggaagattttcgtatgttcaaaaatggatctttttggaggccaccaccattaaatccgtacttgcatggaatgtcagaagagcaagaaacagaagcttttgtagaggaacctagtaaaaagggagcacttaaggaagaacagagggataaattggaagaaatcttgcggggattaactccaaggaaaaatgatattggagatgcaatggttttctgtcttaataatgctgaagctgctgaagaaatagtggattgcattactgagtcgttgtccatcttaaagacaccccttcctaaaaagattgccagattatatttggtttctgatgttttgtacaactcttcagccaaagttgctaatgcttcatattatagaaaattttttgaaacaaagttatgtcagatattttcagacctcaatgccacctatcgtacaattcaaggccatttacaatctgaaaactttaagcaacgggtaatgacttgcttcagagcatgggaagattgggcaatttatccagaaccatttttgatcaaactacaaaatattttcttaggacttgtaaatattattgaagaaaaggaaacagaggatgttccagatgaccttgatggtgcccccatcgaggaagagcttgatggtgcacctctggaagatgtagatggaattcctattgatgctactcccatcgatgatcttgatggagtccctataaaaagtcttgatgatgatcttgatggagtgcctttggatgcaactgaagactcaaaaaagaatgagcctatatttaaagttgccccatcaaaatgggaagctgtggatgaatctgaattggaagcacaggctgttacaacttctaaatgggaattatttgaccagcatgaagaatcagaagaagaagaaaatcaaaatcaagaagaagaaagtgaagatgaagaagatactcaaagttccaaatctgaagaacatcatttgtactctaatccaatcaaagaagaaatgactgagtctaagttctctaagtactctgaaatgagtgaggaaaaacgagccaaacttcgtgaaattgagctcaaagttatgaagtttcaggatgaattggaatctgggaaaagacctaaaaaaccaggccagagttttcaggagcaagtagaacactacagagataaacttcttcaacgagagaaagagaaagagttagaaagagaacgagaaagagacaagaaagataaagaaaaattggaatctcgctccaaagacaagaaggaaaaagatgagtgtactccgacaaggaaggaaaggaagaggcgacacagtacatcccccagcccatctcgcagtagcagtggtagacgagtgaaatccccatcaccaaaatcggagcgatcagagcgttcagaaagatctcataaagagagctcacggtccaggtcatctcacaaagattctcctagagatgttagcaaaaaagccaaaagatcaccatctggttcaaggacacctaaaaggtctaggcgatcacggtctagatctcctaaaaaatcaggaaagaagtccagatcccagtccagatctccacacaggtctcataaaaagtcaaagaaaaacaaacactgacgtaaatttttaagatgctgtcacttattggaaatgcgatttgttttgtgcctgaacggtctgttttttaaaaaaacaaaaaatcaaatgaaagagcattcctggggttttttgtttgtttgtgtatgcatgtgtaaactcatgagcaactgcatctgtagatctgtcattgttttatattgtgtaaattactttcattgtggctatttctcaagatgaaatttttattgttctaatggatttcatcagaaatgtgtataatggatctgctgacagtagtagtattttgttttaggatgttgtgacttagcaaaaataatacagatgtcttccccccttttgtagctttgacaatttgaattagatttcaaataaaatctgaacagaaaactataatgttgtttttttgccccaccggtgatattaagtcccttaaagtcctactgagtttcacactactgttgtgcttcttatacctgatgcactttataagccccagtgttcaagtagcttaagttttatatttactaagatgactatccaaattaagggacctgagactcctatttggtggtttgctaaccatttgcttttgataagtttctcttgggtaatactaatacccagatatcaaagactaggtagatatggcatggcgttttgttagtggaatgcctggctaaaacatttttttcacagaagcaatatgatttccatacatccaacccatgttctgagcaactacttacttttagggggaaattaaatatcttttcatttcctcttctattatgaaagaagtttatttgtaaaacaaattttctaacaaggtttggccatagaattctcttgtatgatcgttgaccttttataatcttctgtaggctatctttcaaacactggcatcagaatattttttataagtttgtgtttaaacagcttagttggtccccccccactcccaagagacttgggtttagttatagctttaagtaaaatttaaaaataaaatgtttttcaggaaacttcgtatctaatggtttgtaaattcaaggtgcaaaaagttgatttaaaccatttgcagagttgaactctattatgaaaataaatttgctacggtatgaggaagaaataaaacttgtgtaatgttggtcataatactgctataaatataataaagggttatgtagaattgaactgacactattatttgtgaatcttgatttcagttttttatgtaggcacttcatacactggtttgatgggttttttttttcctccctaaaagagaaagtagaaaactattctaacaatggattattttgatttagcttgctttttaaaaaaatcttttcaacttgttttacttaatcttgcctagtcacaaaataagatgtgcacccatggtttggagagttcctatattagctgagcagtgagatacactatttccaaacggtgcacacctacagtagctttggaaatgagccaatcactgttttacttaatggttcttatcagcatgcaaatattgcttgaaagttatttccttattcactgttttgttagtccattttgttaggaaacattaattcctaaaaatttgttcagaataattaaaagtgaacatttggtgctgatactcaaaaacctacaaatgtagccatttaaaaagtaacatgtttttctcccctgctcattgcctgggagaatggaattttatataactacctttctttgcaaaaataacggtcgtgtcgagttggtggtgattttggcattccatcttgcactggtttctagtataggcttagaaataattggtcaggtaataatctttccagtcaagttgcaagggatgcttatttctcttcaaaaaaagacatcctgcgggattgagtagaaaattttaggtcagttttgggtgcttatttgtaatatttttcctactacattggagtttagcagttctttttttctggatccagatacaagtgtcatggtttatcttacagtgggtgaaactgactttcttttggttgggtgggtgaggatttcttaggcctgatagaatatatattctgtgaagtttgttaatgtacatattagattgtattggatttttttttcttgaattgcaaatggtattattagataggttatttccagttttacttcatgacaaattacctagagtaaacctacttaatactcccatggattctatgaaagtttaatgggatcagaaattggtgacttataagggggaagatattctaccatatttttataatagcttattattcatgtttcttgtctgaaggacactcaagttacagagcaaaatttctataggttgactagaatgttcataagcatggtcttccagttgcaggaaagatcatgttctatctgtggacacttactgtcctctaccacagctacgtgccagagttgttttccacagttcttataaagggcatgacttaggctctttaccctccaacttaatgtttatacacagggattgtttactaggttaatgacatttaactcccctctcttctgtaggtgagagaaaataagtaagtcttgatctgtttcttaccaaagagagacagacctatgatggaaaatgatcacgtctctgaattttttctttaacgttatagttccttattacagatagtaagcatatgggaatttctgagctataacatgttgagaagttagaaattaaaactaacacaacaaaaggcgctgaatcaaaagatctttgcttttatttggctcagaatgtttttggcttttctgctaaagatggcagaaattactctacacagacctgatttttctttattgcagaccattcttgtgggcttaccctgagacttttatcccaattagtgaatcttggagggaatacttgcttatttatgacttaggtatttccccccaaactttaatattcttgagcacttgaaaatacttttgagaaattttaactgtgattaaatttaggtttattagaaatattctgtacacatttgcctccatggtggcgtaagttctgaaaaattatatgaccgtgacaatagtttatcatcatcattattgttattcaaaataagggtaaataaatctctgtattgccaaagtgacttaaactgttctgatgaccacacagtgtgatttctttagcagagaaagttggttttaaaaataaatagtaccacttttctaagactgtacagtttacaaataaggtttttttctttgttgttttcctcttctattaagttttagtgaaaagcctaattacagaaaattgtgcagatactagtgaagatactagtataagtttaaaggaacacgtgactgtaaaatctcacatttacaaagtgcttgatctcttcatatttcacacgcatgttttagaatagattttagggagtgtttaattcattatccttttgacttaaaatttttgttaccaacttcctaggacttagataatatataaataagtacaaatcccaggggaagtgttgtgatgctagactaaaaggtgggaatgtgctgctgttccgtgagccttgttccattgttgaaaatttgatgcctcagtgtttattcagtaccacctcatggagcttcaatgtaaatggattatatgtataattggtaatttgtatagttttgtagattgtagattaaatgcactcatcatgtc

SEQ ID NO: 41 - DNA, 7444 bp, Homo sapiens
gctggctgcggaaggggagggggggggagaaggcgattggatgcggcggcggcggcggatcccggagagccccggagtgagcggagtagcgagtcggcaacccggaggggtagaaatatttctgtcatggctcattcaaagactaggaccaatgatggaaaaattacatatccgcctggggtcaaggaaatatcagataaaatatctaaagaggagatggtgagacgattaaagatggttgtgaaaacttttatggatatggaccaggactctgaagaagaaaaggagctttatttaaacctagctttacatcttgcttcagatttttttctcaagcatcctgataaagatgttcgcttactggtagcctgctgccttgctgatattttcaggatttatgctcctgaagctccttacacatcccctgataaactaaaggatatatttatgtttataacaagacagttgaaggggctagaggatacaaagagcccacaattcaataggtatttttatttacttgagaacattgcttgggtcaagtcatataacatatgctttgagttagaagatagcaatgaaattttcacccagctatacagaaccttattttcagttataaacaatggccacaatcagaaagtccatatgcacatggtagaccttatgagctctattatttgtgaaggtgatacagtgtctcaggagcttttggatacggttttagtaaatctggtacctgctcataagaatttaaacaagcaagcatatgatttggcaaaggctttactgaagaggacagctcaagctattgagccatatattaccaatttttttaatcaggttctgatgcttgggaaaacatctatcagcgatttgtcagagcatgtctttgacttaattttggagctctacaatattgatagtcatttgctgctctctgttttaccccagcttgaatttaaattaaagagcaatgataatgaggagcgcctacaagttgttaaactactggcaaaaatgtttggggcaaaggattcagaattggcttctcaaaacaagccactttggcagtgctacttgggcaggtttaatgatatccatgtaccaatccgcctggaatgtgtgaaatttgctagccattgtctcatgaaccatcctgatttagcaaaagacttaacagagtatcttaaagtgaggtcacatgaccctgaggaagctattagacatgatgttattgtgtcaatagttacagctgctaaaaaggatattcttctggtcaatgatcacttacttaattttgtgagagagagaacattagacaaacgatggagagtacgcaaagaagccatgatgggacttgcccaaatttataagaaatatgctttacagtcagcagctggaaaagatgctgcaaaacagatagcatggatcaaagacaaattgctacatatatattatcaaaatagtattgatgatcgactacttgttgaacggatctttgctcaatacatggttcctcacaatttagaaactacagaacggatgaaatgcttatattacttgtatgccacactggatttaaatgctgtgaaagcattgaatgaaatgtggaaatgtcaaaatctgctccgacatcaagtaaaggatttgcttgacttgattaagcaacccaaaacagatgccagtgtcaaggccatattttcaaaagtgatggttattacaagaaatttacctgatcctggtaaggctcaggatttcatgaagaaattcacacaggtgttagaagatgatgagaaaataagaaagcagttagaagtacttgttagtccaacatgctcctgcaagcaggctgaaggttgtgtgcgtgaaataactaagaagttgggcaaccccaaacagcctacaaatcctttcctggaaatgatcaagtttctcttggagaggatagcacctgtgcacatagataccgaatctatcagtgctcttattaaacaagtgaacaaatcaatagatggaacagcagatgatgaagatgagggtgttccaactgatcaagccatcagagcaggtcttgaactgcttaaggtactctcatttacacatcccatctcatttcattctgctgaaacatttgaatcattactggcttgtctgaaaatggatgatgaaaaagtagcagaagctgcactacaaattttcaaaaacacaggaagcaaaattgaagaggattttccacacatcagatcagccttgcttcctgttttacatcacaaatctaaaaaaggacccccccgtcaagccaaatatgccattcattgtatccatgcgatattttctagtaaagagacccagtttgcacagatatttgagcctctgcataagagcctagatccaagcaacctggaacatctcataacaccattggttactattggtcatattgctctccttgcacctgatcaatttgctgctcctttgaaatctttggtagctactttcattgtgaaagatcttctcatgaatgatcggcttccagggaaaaagacaactaaactttgggttccagatgaagaagtatctcctgagacaatggtcaaaattcaggctattaaaatgatggttcgatggctacttggaatgaaaaataatcacagtaaatcaggaacttctaccttaagattgctaacaacaatattgcatagtgatggagacttgacagaacaggggaaaattagtaaaccagatatgtcacgtctgagacttgctgctgggagtgctattgtgaagctggcacaagaaccctgttaccatgaaatcatcacattagaacaatatcagctatgtgcattagctatcaacgatgaatgctatcaagtaagacaagtgtttgcccagaaacttcacaaaggcctttcccgtttacggcttccacttgagtatatggcaatctgtgccctttgtgcaaaagatcctgtaaaggagagaagagctcatgctaggcaatgtttggtgaaaaatataaatgtaaggcgggagtatctgaagcagcatgcagctgttagtgaaaaattattgtctcttctaccagagtatgttgttccatatacaattcaccttttggcacatgacccagattatgtcaaagtacaggatattgaacaacttaaagatgttaaagaatgtctttggtttgttctggaaatattaatggctaaaaatgaaaataacagtcacgcttttatcagaaagatggtagaaaatattaaacaaacaaaagatgcccaaggaccagatgatgcaaaaatgaatgaaaaactgtacactgtgtgtgatgttgccatgaatatcatcatgtcaaagagtactacatacagtttggaatctcctaaagacccggtactaccagctcgtttcttcactcaacctgacaagaatttcagtaacaccaaaaattatctgcctcctgaaatgaaatcatttttcactcctggaaaacctaaaacaaccaatgttctaggagctgttaacaagccactttcatcagcaggcaagcaatctcagaccaaatcatcacgaatggaaactgtaagcaatgcaagcagcagctcaaatccaagctctcctggaagaataaaggggaggcttgatagttctgaaatggatcacagtgaaaatgaagattacacaatgtcttcacctttgccggggaaaaaaagtgacaagagagacgactctgatcttgtaaggtctgaattggagaagcctagaggcaggaaaaaaacgcccgtcacagaacaggaggagaaattaggtatggatgacttgactaagttggtacaggaacagaaacctaaaggcagtcagcgaagtcggaaaagaggccatacggcttcagaatctgatgaacagcagtggcctgaggaaaagaggctcaaagaagatatattagaaaatgaagatgaacagaatagtccgccaaaaaagggtaaaagaggccgaccaccaaaacctcttggtggaggtacaccaaaagaagagccaacaatgaaaacttctaaaaaaggaagcaaaaaaaaatctggacctccagcaccagaggaggaggaagaagaagaaagacaaagtggaaatacggaacagaagtccaaaagcaaacagcaccgagtgtcaaggagagcacagcagagagcagaatctcctgaatctagtgcaattgaatccacacagtccacaccacagaaaggacgaggaagaccatcaaaaacgccatcaccatcacaaccaaaaaaaaatgtccgtgtaggacgctccaaacaagcagctactaaggaaaatgattcaagtgaagaagtagatgtgtttcagggtagctctcctgtcgatgatattccacaggaagaaacagaggaggaggaagtttctacagtaaatgtacggcggcgaagtgctaaaagggaacggcgatgaacaaatgtaattaataactttctctgtgaaagctttggaaaaatcttttttttttttttttttttttggtcaagcttgaggctgaataaagcctttgatgcacaaaatgggactgctgaagagtggacagttggaccttactttggtgaccccatacatttgtggtcacatgctttagccatacacatggtaacattgactatggagtcttgtgaaagtgtaatgtgcgatggctatgtagacataaagaagaaacttgtaaatatcttttttcttttttttaatgtttctgatttctgaagtgcttgtatagcttttatctgcggctttaaactgacagtacccgactgtttattggatctattgatttgaaaagaatttgttaggatagatcttaagcagtaatctgtcagtgtttgtatttgtattctctgcaattttactgtgaaaaaaaatttgttttcaacaattggtgtcattttcttgatgtcactatttgttggagagttaaatggtctcttccctttgtgtatcttacctagtgtttactcctgggcacccttaatcttcagaggtgctaaattgtctgccattacaccagaaggatgcctctgataggaggacaaccatgcaaattgtgaaatagtcctgaagttcttggattactttacacctcagtattgatttgtcccagaattttctggcctttcatggcaatgaaaattttaagaagaaagatttaaagtattttaattttaaagagtgtgttataaaataatgtactgaattctttatcccattttatcatcctttcagtttttattaatctactgtatcaataaaattctgtaatttgaatgagtttttaatagtctagaatgttattgtgtatagatatttcctcttgaacgttatgttcagaaaatgcaaattacactataatataaaacctgatatatacacattagaaatattccagttctccgtaacagtgtaaagttaatcagaaagaaaaaattttattgatgcagtgtgtctttataaagctgttcttgaaagccaagtgttttgtattttatagtgagttgcatgtttttgaaaaaaagtgctgaaaatgggatgtgctgttttctgtaaattcatatttagccatagtatatgatagattgccccataacatagtttttcatcaagagtttattattgtactttattttggagccaaaaaattgattctggggggtgggggcagcgtagaagtggtatatccaagtatatcagctactgtagttgtcacagtcttgtgaactttgaatgaaattccactttgtccagattgggagaagtggaaatttatttggatttagagcaggtctttttttttcttcattgtaatctgcaaaatgtagaaataaattacttaaggcagtatcctttatacagttgtataaactgtattttgaaccaaaacatataggttactacttaatgcttacctaatttcattttagtattttaggtgctgttatgttttttcatggttaacaccagaggggaaaaaatcatattctaacttattaaatttatcacattgaatagtggaacattttcatatgatacaccattatgtttaagatatatttccaagattggttataatagatggggcatataataaagaagctactattttggaaaatgacattttactatttgccaatgtatattgcaattgatgtgattatttttcttttaaagatttgtttgtgtttatgaaacagccatttattttttaaaaagtgttttgaattgtgtcttaatctctccatattcaactattcttcatttacaacaatagtgacaccagtaattatgagaggctgtcatatatcaaagcagctcaggtgggatcaacatacattggttttgaaatgtttccttagctcggttctcccaaacacataatttctgtttcagcagtacaaaggcatgttttaaaatctataacataaagaataaggaatagctttgtatttttgtcattgattaaattgcaccagaaatgtttatggaaatattaagaacattttataaaacatacgaaaaagtgattgtgaaggatttttatttgcatgattatagttaagcaaatttcatttcacatttttgtaatgctgtacagcagttcacaaaaaaatgttcattgtagattttgttatgttcaatgccaatgagtctgtaattttacgacctgtctgttctttttttgggtggattacgatgtaaatttttcttttctttctttctttttttttttttttgtgtagaaaaataggtgcaataatgatcaaagttttgatgtcttgagtctccatcttaggggattatcttacgtttaagcttaacatttcatgtagtaagatttggagagccacatactttacagtaaaattaagtgtgtataaaacattaattgctaacaattgttagcaaactatttcagtgataatgttcattttgaaaatatgtactgtataacattaagaaaatatttaactccctgtaacaagttccattatgaaaatcttattcctcagtgaggttatcttgctgcactctgtagcaaatttgtttaatctacattataataaaatttcttgctgcagtgcaacaggaggctttttcagtgatcttcactgtatatgtaaattacaaatgtggctgtaaaacttattccaggtattaaaggttaaattgctttctatatcttcttataacttgtaagtctgatttttaagatttccttttgtccacttgtaagaatgtcaggaatttaagaatttgtttaaattaggcatatctctgccatcacatagtattatgtcaccataatgaacaattgctatttaaatagataaccaattttcagacacatttttggatttctgtgaagttgaataaacataaaagctaa

SEQ ID NO: 42 - DNA, 1851 bp, Homo sapiens
ggccggtcagcgtcgctgccggtctccggcggagacggactctggagtttgggcggcccgggcggccactaggtactctgatattccgtactaaacacgtctgcaagtcaagatgtcgcacccgtccccccaagccaagccctccaaccccagtaaccctcgagtcttctttgacgtggacatcggaggggagcgagttggtcgaattgtcttagaattgtttgcagatatcgtacccaaaactgcggaaaattttcgtgcactgtgtacaggagaaaaaggcattggacacacgactgggaaacctctccatttcaaaggatgcccttttcatcgaattattaagaaatttatgattcagggtggagacttctcaaatcagaatgggacaggtggagaaagtatttatggtgaaaaatttgaagatgaaaatttccattacaagcatgatcgggagggtttactgagcatggcaaatgcaggccgcaacacaaacggttctcagttttttatcacaacagttccaactcctcatttggatgggaaacatgtggtgtttggccaagtaattaaaggaataggagtggcaaggatattggaaaatgtggaagtgaaaggtgaaaaacctgctaaattgtgcgttattgcagaatgtggagaattgaaggaaggagatgacgggggaatattcccaaaagatggctctggcgacagtcatccagatttccctgaggatgcggatatagatttaaaagatgtagataaaattttattaataacagaagacttaaaaaacattggaaatacttttttcaaatcccagaactgggagatggctattaaaaaatatgcagaagttttaagatacgtggacagttcaaaggctgttattgagacagcagatagagccaagctgcaacctatagctttaagctgtgtactgaatattggtgcttgtaaactgaagatgtcaaattggcagggagcaattgacagttgtttagaggctcttgaactagacccatcaaataccaaagcattgtaccgcagagctcaaggatggcaaggattaaaagaatatgatcaagcattggctgatcttaagaaagctcaggggatagcaccagaagataaagctatccaggcagaattgctgaaagtcaaacaaaagataaaggcacagaaagataaagagaaggcagtatatgcaaaaatgtttgcttagaaaggattcagttttgcttattgtgtgttgattgtataaatgcaataagaaaatgtaaaggtttttgtctatgaatatgatccctaatgtgtttcttttgacaccttagttccttactgtttacagtttaggagtactgataggggttcatgcttaataaacatgtcacaatacagtaagtaaagtggttttgtttgtttctttgagatggagtcttgctctgtcacccaggctggagtgcggtggcgcaatctcggctcactgcatcctctgcctcccgggttcaagcaattctcctgcctcagcttcccaagtagctgggattacaggcacgtgccaccacgcccagctaatttttgtatttttagtagagatggggtttcaccatattggtcacgtcacgttggtcttgaactcctgaccttgtgatccaccccgccttggcctcccaaagtgctgggattacaggtgtgagccaccgtgcccggccaagtaaaatgttttttaaaatggttatgtgcattattcataaaaaataatggtgtccagtctttttaaacttgtaaagacacatcttattgaataaagagatgagagcttaagtttgtaaaaaaaaaaaaaaaaaa

SEQ ID NO: 43 - DNA, 600 bp, Homo sapiens
agtcttggcggaggtgaccaaagccacgtaatgtccgtagttcgctcatccgtccatgccagatggattgtggggaaggtgattgggacaaaaatgcaaaagactgctaaagtgagagtgaccaggcttgttctggatccctatttattaaagtattttaataagcggaaaacctactttgctcacgatgcccttcagcagtgcacagttggggatattgtgcttctcagagctttacctgttccacgagcaaagcatgtgaaacatgaactggctgagatcgttttcaaagttggaaaagtcatagatccagtgacaggaaagccctgtgctggaactacctacctggagagtccgttgagttcggaaaccacccagctaagcaaaaatctggaagaactcaatatctcttcagcacagtgaagcgggagtggaagaaggatctaaagggaaaaactgacatgtttatgttatggaaaaagaaatttttctaagtttcatcacaaactgtgtccagtttctctgtggtgtttatgaaatagctaaaagcaaatgaagtaaagggcatactatggtttttcacaaaaaaaaaaaaaaaaa

SEQ ID NO: 44 - DNA, 2283 bp, Homo sapiens
agcggttacccgcgctgcctccggtgccgctggcgaccgctgagccgcttcccgcgcgtcgcctagcccgcccctcagctcgccgcagccccggctcctccctcgtccggcccccggggcggggtctgtcagcttgccctcccctctccgcctaagcctgccctatgccagccgggtgtcctccccacagcaccacggcttctcttcctcagcacggcgacaggggcttccccttcgccgccgccgccgccgccggccaagctccgccgcgcccgcggcccgcggccgccatgcagtttatgttgctttttagtcgtcagggaaagcttcgactgcaaaaatggtatgtcccactatcagacaaagagaagaaaaagatcacaagagaacttgttcagaccgttttagcacggaaacctaaaatgtgcagcttccttgagtggcgagatctgaagattgtttacaaaagatatgctagtctgtatttttgctgtgctattgaggatcaggacaatgaactaattaccctggaaataattcatcgttatgtggaattacttgacaagtatttcggcagtgtctgtgaactagatatcatctttaattttgagaaggcttattttattttggatgagtttcttttgggaggggaagttcaggaaacatccaagaaaaatgtccttaaagcaattgagcaggctgatctactgcaggaggaagctgaaaccccacgtagtgttcttgaagaaattggactgacataactctcctcccttgttgatgacttcttgtggcatttcacacactgtagatggtcactcccttcatgtccatgttagctcatggtgtaagatgatgtcttgtcagtattactgttttgctaagccgcttcattcatgcctacacaatttttttttaaaagggaactttagttaattaagtgataagggacttaaatatgaattagaatggtgcagaaagagataccttttctggatattttaaagtttaaaggtcagtttctcttaatctgattatgtgcacatatgaaaatggcacatcatatacatgtaaaatcaggcagtatacatttattaattactgtatttgacaaaggaaactcttaaattataatgtgaaacctggttttatgaaaccaaagactagtgcagcatttcagcatatgtaaaaaaaaaaaaaaagggaattgacatgtcacatatcaaatgaatggaaactttgttgaaactttaaaaagcaaatttactccaaagacttgtattggaaattacataccttttttttttttttttaaaggactacagattatttttaatgactaaattggagtgatacttcttacactaaaaattatttcttaggcattctgaatctgggatgagaaacaggattgtttcacaatagtaagcacataatttttaaggccaaggcacatttgactcctgagatgaattttttgtggtcataatcaaatacttagttgtttttgatgccccaaaataaagtgagaatggtaatttgccaggaattcttcataacagtatcttacaaaaaacgtgttgctctcttcacagtattatgtgtaaagtcattgtttaaagcacgaatgttccctctggggtacttgttaaagctaaatttattttgcttccctccacttagaagtgctgcacactttacagcagcttcctttctttccatggcactgcctagttaacagaagtcttataaaaatttaaaaagacacatttcttacaaaaaagagttgaatgaggtaaaatggcattagatggctctatattttttaaagctatgtaattgttcagcgtcacttttctaagtacttatacatatctaaacatgtcttcatggtttatattttcacttatatatgctgggctggattaagctttgttgtgattgtgaccaacattcaggccacgtgagcactgtcttatcacatcgccaattagttgtaataaacgttcaacgtacaaacactggagtgtgtttttatctctttccaaaagtttgtcaaactatgcagagctgctgaaggaagaatttctcatttttttttcagtaaaatgttgaaaattcccctccatttgaatatggtggttgttataagcacacacaagatacatggtggaagatctaaggagtcttcatgtacttcattaaaaaataacatggattccatactgagagcctatctacacatttattttcaatcaataaatgctgcttttaaaaccttga

SEQ ID NO: 45 - DNA, 2912 bp, Homo sapiens
cagttgcttcagcgtcccggtgtggctgtgccgttggtcctgtgcggtcacttagccaagatgcctgaggaaacccagacccaagaccaaccgatggaggaggaggaggttgagacgttcgcctttcaggcagaaattgcccagttgatgtcattgatcatcaatactttctactcgaacaaagagatctttctgagagagctcatttcaaattcatcagatgcattggacaaaatccggtatgaaactttgacagatcccagtaaattagactctgggaaagagctgcatattaaccttataccgaacaaacaagatcgaactctcactattgtggatactggaattggaatgaccaaggctgacttgatcaataaccttggtactatcgccaagtctgggaccaaagcgttcatggaagctttgcaggctggtgcagatatctctatgattggccagttcggtgttggtttttattctgcttatttggttgctgagaaagtaactgtgatcaccaaacataacgatgatgagcagtacgcttgggagtcctcagcagggggatcattcacagtgaggacagacacaggtgaacctatgggtcgtggaacaaaagttatcctacacctgaaagaagaccaaactgagtacttggaggaacgaagaataaaggagattgtgaagaaacattctcagtttattggatatcccattactctttttgtggagaaggaacgtgataaagaagtaagcgatgatgaggctgaagaaaaggaagacaaagaagaagaaaaagaaaaagaagagaaagagtcggaagacaaacctgaaattgaagatgttggttctgatgaggaagaagaaaagaaggatggtgacaagaagaagaagaagaagattaaggaaaagtacatcgatcaagaagagctcaacaaaacaaagcccatctggaccagaaatcccgacgatattactaatgaggagtacggagaattctataagagcttgaccaatgactgggaagatcacttggcagtgaagcatttttcagttgaaggacagttggaattcagagcccttctatttgtcccacgacgtgctccttttgatctgtttgaaaacagaaagaaaaagaacaatatcaaattgtatgtacgcagagttttcatcatggataactgtgaggagctaatccctgaatatctgaacttcattagaggggtggtagactcggaggatctccctctaaacatatcccgtgagatgttgcaacaaagcaaaattttgaaagttatcaggaagaatttggtcaaaaaatgcttagaactctttactgaactggcggaagataaagagaactacaagaaattctatgagcagttctctaaaaacataaagcttggaatacacgaagactctcaaaatcggaagaagctttcagagctgttaaggtactacacatctgcctctggtgatgagatggtttctctcaaggactactgcaccagaatgaaggagaaccagaaacatatctattatatcacaggtgagaccaaggaccaggtagctaactcagcctttgtggaacgtcttcggaaacatggcttagaagtgatctatatgattgagcccattgatgagtactgtgtccaacagctgaaggaatttgaggggaagactttagtgtcagtcaccaaagaaggcctggaacttccagaggatgaagaagagaaaaagaagcaggaagagaaaaaaacaaagtttgagaacctctgcaaaatcatgaaagacatattggagaaaaaagttgaaaaggtggttgtgtcaaaccgattggtgacatctccatgctgtattgtcacaagcacatatggctggacagcaaacatggagagaatcatgaaagctcaagccctaagagacaactcaacaatgggttacatggcagcaaagaaacacctggagataaaccctgaccattccattattgagaccttaaggcaaaaggcagaggctgataagaacgacaagtctgtgaaggatctggtcatcttgctttatgaaactgcgctcctgtcttctggcttcagtctggaagatccccagacacatgctaacaggatctacaggatgatcaaacttggtctgggtattgatgaagatgaccctactgctgatgataccagtgctgctgtaactgaagaaatgccaccccttgaaggagatgacgacacatcacgcatggaagaagtagactaatctctggctgagggatgacttacctgttcagtactctacaattcctctgataatatattttcaaggatgtttttctttatttttgttaatattaaaaagtctgtatggcatgacaactactttaaggggaagataagatttctgtctactaagtgatgctgtgataccttaggcactaaagcagagctagtaatgctttttgagtttcatgttggttctttcacagatggggtaacgtgcactgtaagacgtatgtaacatgatgttaactttgtgtggtctaaagtgtttagctgtcaagccggatgcctaagtagaccaaatcttgttattgaagtgttctgagctgtatcttgatgtttagaaaagtattcgttacatcttgtaggatctactttttgaacttttcattccctgtagttgacaattctgcatgtactagtcctctagaaataggttaaactgaagcaacttgatggaaggatctctccacagggcttgttttccaaagaaaagtattgtttggaggagcaaagttaaaagcctacctaagcatatcgtaaagctgttcaaatactcgagcccagtcttgtggatggaaatgtagtgctcgagtcacattctgcttaaagttgtaacaaatacagatgagt

SEQ ID NO: 46 - DNA, 1593 bp, Homo sapiens
ccgccgccgccgcagcccggccgcgccccgccgccgccgccgccgccatgggctgcctcgggaacagtaagaccgaggaccagcgcaacgaggagaaggcgcagcgtgaggccaacaaaaagatcgagaagcagctgcagaaggacaagcaggtctaccgggccacgcaccgcctgctgctgctgggtgctggagaatctggtaaaagcaccattgtgaagcagatgaggatcctgcatgttaatgggtttaatggagagggcggcgaagaggacccgcaggctgcaaggagcaacagcgatggtgagaaggcaaccaaagtgcaggacatcaaaaacaacctgaaagaggcgattgaaaccattgtggccgccatgagcaacctggtgccccccgtggagctggccaaccccgagaaccagttcagagtggactacatcctgagtgtgatgaacgtgcctgactttgacttccctcccgaattctatgagcatgccaaggctctgtgggaggatgaaggagtgcgtgcctgctacgaacgctccaacgagtaccagctgattgactgtgcccagtacttcctggacaagatcgacgtgatcaagcaggctgactatgtgccgagcgatcaggacctgcttcgctgccgtgtcctgacttctggaatctttgagaccaagttccaggtggacaaagtcaacttccacatgtttgacgtgggtggccagcgcgatgaacgccgcaagtggatccagtgcttcaacgatgtgactgccatcatcttcgtggtggccagcagcagctacaacatggtcatccgggaggacaaccagaccaaccgcctgcaggaggctctgaacctcttcaagagcatctggaacaacagatggctgcgcaccatctctgtgatcctgttcctcaacaagcaagatctgctcgctgagaaagtccttgctgggaaatcgaagattgaggactactttccagaatttgctcgctacactactcctgaggatgctactcccgagcccggagaggacccacgcgtgacccgggccaagtacttcattcgagatgagtttctgaggatcagcactgccagtggagatgggcgtcactactgctaccctcatttcacctgcgctgtggacactgagaacatccgccgtgtgttcaacgactgccgtgacatcattcagcgcatgcaccttcgtcagtacgagctgctctaagaagggaacccccaaatttaattaaagccttaagcacaattaattaaaagtgaaacgtaattgtacaagcagttaatcacccaccatagggcatgattaacaaagcaacctttcccttcccccgagtgattttgcgaaacccccttttcccttcagcttgcttagatgttccaaatttagaaagcttaaggcggcctacagaaaaaggaaaaaaggccacaaaagttccctctcactttcagtaaaaataaataaaacagcagcagcaaacaaataaaatgaaataaaagaaacaaatgaaataaatattgtgttgtgcagcattaaaaaaaatcaaaataaaaattaaatgtgagcaaag

SEQ ID NO: 47 - DNA, 3113 bp, Homo sapiens
gaacctggcttcgctaacgccctcccagctccctcgggcctgacttccggtttcctcgcgcgtccctggcgccgagcccgcggacagcggcagccccttttccggctgagagctcatccacacttccaatcactttccggagtgcttcccctccctccggcccgtgctggtcccgacggcgggcctgggtctcgcgcgcgtattgctgggtaacgggccttctctcgcgtcggcccggcccctcctgcctcggctcgtccctccttccagaacgtcccgggctcctgccgagtcagaagaaatgggactccctccgcgacgtgcccggagcagctcccttcgctgtggaagcggcggtgtcttcgaagaaaccggaagcccgtggtgacccctggcgacccggtttgttttcggtccgtttccaaacactaaggaatcgaaactcggcggccttgggggcggccctacgtagcctggcttctggttgtcatggatgcactggtagaagatgatatctgtattctgaatcatgaaaaagcccataagagagatacagtgactccagtttcaatatattcaggagatgaatctgttgcttcccattttgctcttgtcactgcatatgaagacatcaaaaaacgacttaaggattcagagaaagagaactctttgttaaagaagagaataagatttttggaagaaaagctaatagctcgatttgaagaagaaacaagttccgtgggacgagaacaagtaaataaggcctatcatgcatatcgagaggtttgcattgatagagataatttgaagagcaaactggacaaaatgaataaagacaactctgaatctttgaaagtattgaatgagcagctacaatctaaagaagtagaactcctccagctgaggacagaggtggaaactcagcaggtgatgaggaatttaaatccaccttcatcaaactgggaggtggaaaagttgagctgtgacctgaagatccatggtttggaacaagagctggaactgatgaggaaagaatgtagcgatctcaaaatagaactacagaaagccaaacaaacggatccatatcaggaagacaatctgaagagcagagatctccaaaaactaagcatttcaagtgataatatgcagcatgcatactgggaactgaagagagaaatgtctaatttacatctggtgactcaagtacaagctgaactactaagaaaactgaaaacctcaactgcaatcaagaaagcctgtgcccctgtaggatgcagtgaagaccttggaagagacagcacaaaactgcacttgatgaattttactgcaacatacacaagacatccccctctcttaccaaatggcaaagctctttgtcataccacatcttcccctttaccaggagatgtaaaggttttatcagagaaagcaatcctccaatcatggacagacaatgagagatccattcctaatgatggtacatgctttcaggaacacagttcttatggcagaaattctctggaagacaattcctgggtatttccaagtcctcctaaatcaagtgagacagcatttggggaaactaaaactaaaactttgcctttacccaaccttccaccactgcattacttggatcaacataatcagaactgcctttataagaattaatttggaagagattcacgatttcaccatgaggacacttatctctttcagtggtcctcccaagaaattatttaacaaactgaaaggagattttgattaaaattttgcagaggtcttcagtatctatatttgaacacactgtacaatagtacaaaaaccaacatagttggttttctagtatgaaagagcaccctctagctccatattctaagaatctgaaatatgctactatactaattaataagtaaacttaaggtgtttaaaaaactctgccttctatattaattgtaaaattttgcctctcagaagaatggaattggagattgtagacgtggttttacaaaatgtgaaatgtctaaatatctgttcataaaaataaaaggaaaacatgtttcttcaaattgcataatggaacaaatggcaatgtgagtaggttacatttctgttgttataatgcgtaaagatattgaaaatataatgaaataaaagcatcttaggttataccatctttatatgctattgcgtttcaatatttaagatttaaagtgattttttggtcacagtgttttgttgataaaatttttttagaattgaagtttgaattctaagacttgaaacaacctgatcactgaagccaactttgtcccagcacattccttaagtcctaattgggaaaaaaaaaaaaaaaaatgaaatagttgaaaaactctggggtgtaaacaaatgattgtaaccctacacactattcaataagtagtagaaggagcatcacacagatttcagtctaatctgcccttctgtgggccataatataaacataaatgtgtgtaatgataaaaagtcattttcttcaaagagactacagctagctgcacattgtgtagagcagcttctaaattgttagactttgtgttgaaatgtaatattctatttattgagaaagtgatttaaaattattatttttaatcatagaaatcagggtttgggctgtattgatattgtcgatcatgaaatgtccacactttctaagtggccaattatttggaaataaagaaggaaataaagatggcttcacatggaaatttaagttctttcagggtggagatttacttggttcatacaccttttgcctgaattaaagtatttcatgtaggaggacttttatcctttttgatagacagtttcatatatcttgaactcaatatctcagatctcttctactgtattactgaatagcatacatacatagacaatgttcgccattcactagatatttttttctattatcttacacttattcaagcttgtctgtgattaatggaattggtgtcagatgctggaatttattctgaccaatgaacacagctgactcaggggagtacaatctcctgccaagtaatagaaccaaacccaatatgcataaaagaaatacaatactccaggcttta

SEQ ID NO: 48 - DNA, 2386 bp, Homo sapiens
ggaggaggaagcaagcgagggggctggttcctgagcttcgcaattcctgtgtcgccttctgggctcccagcctgccgggtcgcatgatccctccggccggagctggtttttttgccagccaccgcgaggccggctgagttaccggcatccccgcagccacctcctctcccgacctgtgatacaaaagatcttccgggggctgcacctgcctgcctttgcctaaggcggatttgaatctctttctctcccttcagaatcttatcttggctttggatcttagaagagaatcactaaccagagacgagactcagtgagtgagcaggtgttttggacaatggactggttgagcccatccctattataaaaatgtctcagagcaaccgggagctggtggttgactttctctcctacaagctttcccagaaaggatacagctggagtcagtttagtgatgtggaagagaacaggactgaggccccagaagggactgaatcggagatggagacccccagtgccatcaatggcaacccatcctggcacctggcagacagccccgcggtgaatggagccactggccacagcagcagtttggatgcccgggaggtgatccccatggcagcagtaaagcaagcgctgagggaggcaggcgacgagtttgaactgcggtaccggcgggcattcagtgacctgacatcccagctccacatcaccccagggacagcatatcagagctttgaacaggatacttttgtggaactctatgggaacaatgcagcagccgagagccgaaagggccaggaacgcttcaaccgctggttcctgacgggcatgactgtggccggcgtggttctgctgggctcactcttcagtcggaaatgaccagacactgaccatccactctaccctcccacccccttctctgctccaccacatcctccgtccagccgccattgccaccaggagaaccactacatgcagcccatgcccacctgcccatcacagggttgggcccagatctggtcccttgcagctagttttctagaatttatcacacttctgtgagacccccacacctcagttcccttggcctcagaattcacaaaatttccacaaaatctgtccaaaggaggctggcaggtatggaagggtttgtggctgggggcaggagggccctacctgattggtgcaacccttaccccttagcctccctgaaaatgtttttctgccagggagcttgaaagttttcagaacctcttccccagaaaggagactagattgcctttgttttgatgtttgtggcctcagaattgatcattttccccccactctccccacactaacctgggttccctttccttccatccctaccccctaagagccatttaggggccacttttgactagggattcaggctgcttgggataaagatgcaaggaccaggactccctcctcacctctggactggctagagtcctcactcccagtccaaatgtcctccagaagcctctggctagaggccagccccacccaggagggagggggctatagctacaggaagcaccccatgccaaagctagggtggcccttgcagttcagcaccaccctagtcccttcccctccctggctcccatgaccatactgagggaccaactgggcccaagacagatgccccagagctgtttatggcctcagctgcctcacttcctacaagagcagcctgtggcatctttgccttgggctgctcctcatggtgggttcaggggactcagccctgaggtgaaagggagctatcaggaacagctatgggagccccagggtcttccctacctcaggcaggaagggcaggaaggagagcctgctgcatggggtggggtagggctgactagaagggccagtcctgcctggccaggcagatctgtgccccatgcctgtccagcctgggcagccaggctgccaaggccagagtggcctggccaggagctcttcaggcctccctctctcttctgctccacccttggcctgtctcatccccaggggtcccagccaccccgggctctctgctgtacatatttgagactagtttttattccttgtgaagatgatatactatttttgttaagcgtgtctgtatttatgtgtgaggagctgctggcttgcagtgcgcgtgcacgtggagagctggtgcccggagattggacggcctgatgctccctcccctgccctggtccagggaagctggccgagggtcctggctcctgaggggcatctgcccctcccccaacccccaccccacacttgttccagctctttgaaatagtctgtgtgaaggtgaaagtgcagttcagtaataaactgtgtttactcagtgaaaaaaaaaaaaaaaaaa

SEQ ID NO: 49 - DNA, 3462 bp, Homo sapiens
gtgttttcagtctctccgggttgcatgtactgtatgtggagcagtgtacagtgaagcggaggcagagcggctccgcgagcttctctccactttcccatagagaaaccctgactggccgctgagggctagctacacacacgccctcacgcccggcgagcccgcgaggtcactatcatatgacaaaggctttgccgcagttcatcttcctccctgtgtactttccatttgccttcctggaatcctgctgcatcacagaagctggaagttctgatgttccactgaaatcacaatggaaagtcttgacttgactggtcacagtaatgaaaggcagtaatagaaataaggatcattcagcagaaggagaaggggttggaaaacgaccaaaacgaaagtgtcttcagtggcatccattgctagcaaagaaacttcttgatttttcagaagaggaagaagaggaagacgaagaggaggatattgataaggttcaacttcttggggccgatggcctagagcaagatgttggtgaaactgaagatgatgaatcaccagagcagcgagcccggagaccaatgaatgcatttcttttattttgcaaacgccatcgctctcttgtacgtcaggaacaccccaggcttgataaccgaggtgctaccaagatactagctgattggtgggctgttcttgatccaaaggaaaagcagaaatacacagacatggccaaggagtataaggatgcatttatgaaagcaaatcctggctacaaatggtgtcctaccacaaacaagcctgtgaaatccccaacacccactgtcaatccacgaaagaaactttgggccttcccatctgactcttcaagagacttgccaagccccaagaaagcaaagactgaagaaatgcctcagcttaactttggaatggctgatcctactcaaatgggaggcctgagtatgctgctgttagctggagaacatgctcttggcacaccagaggtatcctctggcacatgcaggcctgatgtttcagaatctcctgaattacgtcagaagtcaccattgtttcagtttgccgagatatcttcaagtacgtcccactctgatgcttctacaaagcagtgtcaaacatctgccttgtttcagtttgcagagatttcttcaaacacttcgcagttgggtggtgctgagcctgtaaaacgctgtggaaagtctgcactctttcaactggcagagatgtgcctggcatcagaagggatgaaaatggaagaatcaaagctaataaaagcaaaagaatccgatggtggaagaattaaagaattagagaagggaaaggaagaaaaagaaattaaaatggagaaaacagatgaaactaggttacagaaggaagcagaatttgaaaaatcggctaaggaaaatttaagagattctaaggaattgagaaattttgaggcattgcaaatagatgacataatggctataaaaatggaagatcccaaagaaattagaaaggaagagttagaagaagatcacaaatgtagtcattttcctgatttttcttattctgccagtagcaagataataattagtgatgttcccagtagaaaggatcatatgtgccatcctcatggaattatgatcattgaggatcccgcagcattaaacaagccagaaaagctaaaaaagaaaaagaagaaaagcaaaatggatcgacatggaaatgataaatccacacccaagaagacttgcaaaaagaggcagtcttcggaatctgacattgagagcgtcatatataccattgaagccgtcgcaaaaggagactggggcatagagaaacttggagatacccctcgcaagaaggtccgcacatcctcaagtggcaagggaagcattttggatgccaagccaccaaagaaaaaagtgaaatcaagagagaagaaaatgtcaaaggagaaatcctcagacaccaccaaagagtcaagacctccagatttcattagtatttctgctagcaagaacatttctggtgagacaccagagggtataaaagcagaaccattgacccctatggaagatgcactaccacccagcctatcaggacaggccaagcctgaggacagtgactgtcacagaaaaatagaaacttgtggttccaggaaatccgagaggtcttgcaaaggtgctctttataaaaccctggtgtctgagggcatgctcacctctctgcgagctaatgttgacagaggaaaacgaagctcaggaaaaggaaactcctctgatcatgaagggtgttggaatgaagaaagctggacatttagtcagagtgggaccagtgggagcaagaagttcaagaagacaaagccaaaagaagactgtctccttggctccgcaaagctggatgaagaatttgaaaaaaaattcaacagcctccctcaatatagtcctgttacatttgaccggaaatgtgtacctgtcccaagaaaaaagaagaagactggaaatgtgtcctcagaaccgactaaaaccagcaaaggaagtggggataaatggtcaaacaagcaactcttcttggatgccattcaccctacagaagccatattttcagaagacagaaacaccatggagcctgttcataaggttaaaaatatcccatccattttcaacactccagagccaacaacaacgcaagaacctttggtgggcagccaaaagagaaaagcaaggaaaaccaagattacacaccttgtcaggacagcagatggccgggtatcaccagcaggaggtactttggatgacaaaccaaaggaacaactgcagaggagtctccctaaagcaactgagacagactgcaatgacaaatgctcacacaacaccgaggtcggggagacgcggagcagtactccagaaatgcctgccgtgtctgcgttctttagcctcgctgcgctggctgaagtggcagccatggaaaatgtgcacagaggtcagaggtcaactccgctcacccatgatggacagccaaaagaaatgccgcaggctcctgtacttatttcctgcgctgaccagtgaagcgccctttcattgtaaaacattgtgctttacctactaccctagccttgtctttaccgagggatgctagtgagtccaagtggtggaaaatatagactgcaaacaagtgcttgttgccccacacggcccagattcacttgaagcagaagttagcatcctgggccagtttgttctctcagaacccagaatctttgagggtaaggttatctgtctgatactgagcagaaacagaatgatcctggagctttgctttctattgaaggcttttgacggtaataggtggtaacttggtaaaaggctgcctttactgtagctcacccagcatctcttttaccaaccagagagtgtgaaactagtttcatatattacctagttattctttcaaaacaaaacaaaaaaaacaaaa

SEQ ID NO: 50 - DNA, 3389 bp, Homo sapiens
atgctgctgctaggggtggtgggagcagccgtgggacgcgtggccgggagcgggggtgacagcctgggattccgggggcttctcttccttgtcctcctcctctcctctctattcccagtgtggccgtggctgacactaaagactttgtagccatcaacccgagtgcagtttcgatggaaaatgaaggttgcacgttttcaaaaaatacctaatggtgaaaatgagacaatgattcctgtattgacatcaaaaaaagcaagtgaattaccagtcagtgaagttgcaagcattctccaagctgatcttcagaatggtctaaacaaatgtgaagttagtcataggcgagcctttcatggctggaatgagtttgatattagtgaagatgagccactgtggaagaagtatatttctcagtttaaaaatccccttattatgctgcttctggcttctgcagtcatcagtgttttaatgcatcagtttgatgatgccgtcagtatcactgtggcaatacttatcgttgttacagttgcctttgttcaggaatatcgttcagaaaaatctcttgaagaattgagtaaacttgtgccaccagaatgccattgtgtgcgtgaaggaaaattggagcatacacttgcccgagacttggttccaggtgatacagtttgcctttctgttggggatagagttcctgctgacttacgcttgtttgaggctgtggatctttccattgatgagtccagcttgacaggtgagacaacgccttgttctaaggtgacagctcctcagccagctgcaactaatggagatcttgcatcgagaagtaacattgcctttatgggaacactggtcagatgtggcaaagcaaagggtgttgtcattggaacaggagaaaattctgaatttggggaggtttttaaaatgatgcaagcagaagaggcaccaaaaacccctctgcagaagagcatggacctcttaggaaaacaactttccttttactcctttggtataataggaatcatcatgttggttggctggttactgggaaaagatatcctggaaatgtttactattagtgtaagtttggctgtagcagcaattcctgaaggtctccccattgtggtcacagtgacgctagctcttggtgttatgagaatggtgaagaaaagggccattgtgaaaaagctgcctattgttgaaactctgggctgctgtaatgtgatttgttcagataaaactggaacactgacgaagaatgaaatgactgttactcacatatttacttcagatggtctgcatgctgaggttactggagttggctataatcaatttggggaagtgattgttgatggtgatgttgttcatggattctataacccagctgttagcagaattgttgaggcgggctgtgtgtgcaatgatgctgtaattagaaacaatactctaatggggaagccaacagaaggggccttaattgctcttgcaatgaagatgggtcttgatggacttcaacaagactacatcagaaaagctgaatacccttttagctctgagcaaaagtggatggctgttaagtgtgtacaccgaacacagcaggacagaccagagatttgttttatgaaaggtgcttacgaacaagtaattaagtactgtactacataccagagcaaagggcagaccttgacacttactcagcagcagagagatgtgtaccaacaagagaaggcacgcatgggctcagcgggactcagagttcttgctttggcttctggtcctgaactgggacagctgacatttcttggcttggtgggaatcattgatccacctagaactggtgtgaaagaagctgttacaacactcattgcctcaggagtatcaataaaaatgattactggagattcacaggagactgcagttgcaatcgccagtcgtctgggattgtattccaaaacttcccagtcagtctcaggagaagaaatagatgcaatggatgttcagcagctttcacaaatagtaccaaaggttgcagtattttacagagctagcccaaggcacaagatgaaaattattaagtcgctacagaagaacggttcagttgtagccatgacaggagatggagtaaatgatgcagttgctctgaaggctgcagacattggagttgcgatgggccagactggtacagatgtttgcaaagaggcagcagacatgatcctagtggatgatgattttcaaaccataatgtctgcaatcgaagagggtaaagggatttataataacattaaaaatttcgttagattccagctgagcacgagtatagcagcattaactttaatctcattggctacattaatgaactttcctaatcctctcaatgccatgcagattttgtggatcaatattattatggatggacccccagctcagagccttggagtagaaccagtggataaagatgtcattcgtaaacctcctcgcaactggaaagacagcattttgactaaaaacttgatacttaaaatacttgtttcatcaataatcattgtttgtgggactttgtttgtcttctggcgtgagctacgagacaatgtgattacacctcgagacacaacaatgaccttcacatgctttgtgttttttgacatgttcaatgcactaagttccagatcccagaccaagtctgtgtttgagattggactctgcagtaatagaatgttttgctatgcagttcttggatccatcatgggacaattactagttatttactttcctccgcttcagaaggtttttcagactgagagcctaagcatactgggtctggctctgggagaggagtggacagcagctggttgagatacatccccatctggagacaggactgccactgacagaagatgtgagctgtgtctaagtccagtcttgtgcccagccgtgtctgcgccttcactctttggaactctgcatacaacatcttagcaccatcttcctgcagctcttccttacctaaataaagaaacagcccaagggcagtatttctaaaagcactgtaacagcttttcattttctccacatatactacaaattctataaagaaagaaattaatttaaaaaaactaagatgtttttctcttctggcttcataaatgccttgctgtataaattgaaatattgatactgaactgtctttttaatgatgacctaactttattcaacccatcggaatttactttttccctgaaataagatcttttccactggtctactacctgaccataaacatgtctgcatttgaattctctaaaccctaaatctgtgtctatgaaaaatacaaatgactattaaatattattctctttactgttctctttcaccgaaaaaaaaaaaaaaaaaaaaaa

SEQ ID NO: 51 - DNA, 1501 bp, Homo sapiens
ggggtcggccgggtgctaggccggggccgaggccgaggccggggcgggatccagagcgggagccggcgcgggatctgggactcggagcgggatccggagcgggacccaggagccggcgcggggccatggcgaggcgcgggccagggtggcggccgcttctgctgctcgtgctgctggcgggcgcggcgcagggcggcctctacttccgccggggacagacctgctaccggcctctgcggggggacgggctggctccgctggggcgcagcacatacccccggcctcatgagtacctgtccccagcggatctgcccaagagctgggactggcgcaatgtggatggtgtcaactatgccagcatcacccggaaccagcacatcccccaatactgcggctcctgctgggcccacgccagcaccagcgctatggcggatcggatcaacatcaagaggaagggagcgtggccctccaccctcctgtccgtgcagaacgtcatcgactgcggtaacgctggctcctgtgaagggggtaatgacctgtccgtgtgggactacgcccaccagcacggcatccctgacgagacctgcaacaactaccaggccaaggaccaggagtgtgacaagtttaaccaatgtgggacatgcaatgaattcaaagagtgccacgccatccggaactacaccctctggagggtgggagactacggctccctctctgggagggagaagatgatggcagaaatctacgcaaatggtcccatcagctgtggaataatggcaacagaaagactggctaactacaccggaggcatctatgccgaataccaggacaccacatatataaaccatgtcgtttccgtggctgggtggggcatcagtgatgggactgagtactggattgtccggaattcatggggtgaaccatggggcgagagaggctggctgaggatcgtgaccagcacctataaggatgggaagggcgccagatacaaccttgccatcgaggagcactgtacatttggggaccccatcgtttaaggccatgtcactagaagcgcagtttaagaaaaggcatggtgacccatgaccagaggggatcctatggttatgtgtgccaggctggctggcaggaactggggtggctatcaatattggatggcgaggacagcgtggtactggctgcgagtgttcctgagagttgaaagtgggatgacttatgacacttgcacagcatggctctgcctcacaatgatgcagtcagccacctggtgaagaagtgacctgcaacacaggaaacgatgggacctcagtcttcttcagcagaggacttgatattttgtatttggcaactgtgggcaataatatggcatttaagaggtgaaagagttcagacttatcaccattcttatgtcactttagaatcaagggtgggggagggagggagggagttggcagtttcaaatcgcccaagtgatgaataaagtatctggctctgcacgaga

SEQ ID NO: 52 - DNA, 2068 bp, Homo sapiens
agtcatatttcttgtaaagcagctctttgcagtgtgccaggtttgagatagtgtgcacacaatgtgactactcaacaattaacgtgttttcctgtgagcgaaacttggtgaggagggtggcacatttctctttccgcaatgtgaattcttacacatatacacacattctctctctctctctctctctcacacacacacacacacacacacacacactccccacacccttcaatcatatatccccttagagatgttcattacatcagccatgcagaaggagaaagaaaacccttacccacctgtagccaccagacatgccctctataaggcagctatttacaagactatgaagacatgctctagaaatgaagggacatgcaaaggcgtagaaagaacaaaaagaaaattacaccattctataactgccagggctgagaagaacagaatattagctgacatttcttaaaattgtgttctgtgtactgagtactttatatgctttatcttgtttaatccttacatcaacctcttgaggtacagattatatttattactgttttagagatgaagaaactgaggctcagagatgttcaatgacttatttatgggcacacaagccattctaaatcaccatggaatgcaagttaaaatattcccaccagctgggtgtggtggctcatgcctgtaatcctagaactttgggaggccgaggcaaaaggatcacttcagcccatggtttcaagaccagcctgggtaacatggtgagacccccatctctatttttgaaaataataataattttaaaaatactcccaccttcttctggtttttttctttttgagacagagtcttgcagtgagctgagatcatgccagggcaacagaatgagactttgtttaaaaaaaaaaaagtgacttgatttaagggaaaaaatgactggctatattcagtcagatatggcaaaaagtctcaaggtgttaatgtgaatgattaaggtcttggggggggtgtcccctatcagactacaggtgtttagaggcacagaaaaaggtgcagttgggttcttaatgtgaaatgatgagaagcacaactccagtgtgtctctttgtgtagaatgtcagcagacaccccctgctagatgtgctggatcatgggaaagcatttccatttgttactagattgttcagaagttttaatttatgatgggtgtggtggctcatgcctgtagtcccagcactgtgggaggctgaggcaggaggatcatctgaggccaagagttcaagatcagcctgggcaacatagtgataccctatctcttaaaaaagaagaagtttttaaatttgaaataataataggtactggatttatgcaaatgtcttttctgcgtcttttgagatgagtatcaggtttttttttttccttttatcatctgatgatgaacttaatgtttccatttgtattaatggaatactaagtccctctgtgatttctgaaccaagctattcctaggcctgagttttattttgttgacacagaaataaattagaaggccgagcgtggtggcatgtgcctgtagtcctagttgctgaggtaagaggattgcttgagcccaggagttcaaggctgcagcaagctttgattgcgccactgcactccagccttggcgacagactaagacgctgtctcaaaaaaaaacaaaaacgacaaaaaaaaaacaaaacagaaaaaataaactaaggcaatgacagtccctggcaaatgctgggagggaggcagcagtggtcagggaaggtaaccctgaagcaggacttgtaaagcaaataagattgggaggccaaggtgggtggatcacgaggtcaggagttcgagaccagcctggccaacatagtgaaaccccgtctttactaaaaatacaaaaaaattagccaggtgtggtggtgggtgcctgtagtcccagctacttgggaggctgaggcaggagaatctcgaacccaggaggcggaggttacagtcagctgagaccgcaccatcgcactccagcctgggtgacagagcaagattccgtctc

SEQ ID NO: 53 - DNA, 461 bp, Homo sapiens
ctcgagtccgggccgcaagtcccagacgctgcccatggaggcgtccagcgagccgccgctggatgctaagtccgatgtcaccaaccagcttgtagattttcagtggaaactgggtatggctgtgagctcagacacttgcagatctcttaagtatccttacgttgcagtgatgctaaaagtggcagatcattcaggccaagtaaagaccaagtgctttgaaatgacgattccacagtttcagaatttctacagacagttcaaggaaattgctgcagttattgaaacggtgtgaagacggattctttggttgataaattgctatcattctaaagtcatggacttcactttcggcaacaaaactaaataaggatggaacatttattgaatgaaaaatgcacttttgtttttccatttttttaaataataaaaatcagacaaacaggaaaaaaaaaaaaaaaaaa

SEQ ID NO: 54 - DNA, 456 bp, Homo sapiens
ttttgtttttcagctcacttcaagggtacctgaagcgaattggcaccaaagcagcagctgtattgccgcagttctagcttcaccttcacgatgtttcccttggtcaaaagcgcactaaatcgtctccaagttcgaagcattcagcaaacaatggcaaggcagagccaccagaaacgtacacctgattttcatgacaaatacggtaatgctgtattagctagtggagccactttctgtattgttacatggacatatgtagcaacacaagtcggaatagaatggaacctgtcccctgttggcagagttaccccaaaggaatggaggaatcagtaatcatcccagctggtgtaataatgaattgtttaaaaaacagctcataattgatgccaaattaaagcactgtgtacccattaagatatggcattattgaagaaataaagtacatttgaaaccttc

SEQ ID NO: 55 - DNA, 5627 bp, Homo sapiens
ccccagcagccgccccagccgcagccgcagccgcccggctcgtctgccaccaccccgggcggcggcagcggcggctcgctcagcgccatgccgccgcccagccccgactcagagaacggcttctaccccgggctgccgtcgtccatgaacccggccttcttccctagcttctcgcccgtgtcgccgcacggctgcactgggctcagcgttccgacgagcggcggcggcggcggcggcttcggcggccccttctcggctaccgctgtgccccctccgccgccgcccgccatgaatatacctcaacagcagcccccgccgcccgcggcgccgcagcagccgcagagccggaggtcgcccgtcagcccgcagctccagcagcagcaccaggcggcggccgccgccttcctgcagcagaggaactcctataaccaccaccagcctcttctgaaacagtctccctggagcaaccatcagagcagtggctggggcactggaagtatgtcctggggagcaatgcatggcagagatcatcgtagaaccggaaacatgggaatcccaggaactatgaatcagatatctccattgaagaaaccgttttctggtaatgtcatagcaccaccgaaatttactcgctcaactccatcactgactccaaaatcttggattgaagataatgtgttcagaacagacaacaatagtaatacactcttacccttacaggtgagatctagtttgcagttgccagcttggggctcagattcactccaagatagttggtgcactgcagccggaacatccagaatagaccaggatcgaagtagaatgtatgacagtttgaatatgcactctttggaaaattcccttatcgatattatgagagcagagcatgatcctcttaagggtcgattgagctatccacatccaggaactgacaatctgttgatgttaaatggtcgttcttccctctttccaatagatgatggcttgcttgatgatggtcacagtgatcaagttggagttttaaattcacccacctgttattcagctcaccaaaatggagagcgaatagaacgcttctctcgaaaagtttttgttggtggtcttcctccagatattgatgaagatgaaataactgctagcttcagaagatttgggcctttggtagtagattggcctcataaagcagaaagcaagtcctattttccaccaaaaggctatgcatttcttctctttcaagaagagagctcagttcaggcactcattgatgcttgtattgaagaagatggaaaactctatctgtgtgtttctagccctactatcaaggacaaaccagttcaaatacgtccttggaatttaagtgatagtgattttgtaatggatggttctcagcctttggatccccgaaaaacaatttttgttggaggtgttcctaggccattaagggctgtggaacttgctatgatcatggaccggctgtatggtggagtttgttatgcaggaattgatacagatcctgagctaaaatacccaaaaggtgctgggcgagttgctttctccaatcagcagagctatattgctgccattagtgctcggtttgttcagcttcagcatggtgatattgataaacgtgtggaggtaaagccatatgtgctagatgaccagatgtgtgatgaatgccagggcgcacgctgtggtggaaaatttgctccctttttttgtgccaatgtcacttgcctgcagtattactgtgagttttgttgggcaaatatccactctcgtgctggacgtgagttccataagccattggtaaaggaaggtgctgatcgcccacgtcagatccacttccgctggaactaagaatagcaaactggcctctgtttaacaaggaaagaaagggtgcatgtggcttactgtgtctgaagatactgacatgcagaagaaataagtgcattcttctgcttttcaccccagctatcaatacatgcatctttatcagcagccaaaacactacaagcctcttgtttttcaccaaaaccctacatctcaggcttactaatttttgtgatattttcatgttcaaataaaatgtttttttgtattttctccaagttatttttatatgtaaagttaaaattagatatgagaatgttttgcgtaggggcaacacagtctgctgctatatagtgggggaagcgtgcacttatttctaaacatgggtttttaacttcaagatctgccccagtaatttaccaaaggtagcaaaataatagtgaagatggaatatgtctgctacaaatgcttatttttattgttgctattttcagtgtatacataaactaaaaattagggttgatttttttgctctccattttgacttgcaagaaataatacctcaagataatctgatttattagctatttttaaacatttttaatcacaagctgtattagctttgctgctatataggtgttatgtgtaaatgccacctattaatacgggactgaaaacgttagagacacactgcattgcagataaaatgcaggcagcacaatatggcctaaactgccatagttttagaatgtgaaaaaaatgcatgtttacttacctgtatacaccatatgcatgcactagaattattaactaacgaggtgaggtattgcaaatgttcaaaaaagctctcttgaatctaggtagcatgaacaaattataaaatttgtttaaaaaagcaaacttgcatgcattattgtgacttcaagtttaaaaaatcgtcttacatgtgtacaatatgcaaattagttttagattagagagtgcagccattttgtgatctggtcagtagtggaattcgattttatgcagactggatgtaatatttgtaatccctgtgcaattttgtgacgtgcggttctaattcatgtgcagtgatatagtatagataaaagaatgagtaaaagaaaatacaagaattctaaagaaagttggttttagcccctttgatagtccatggttaagacatcctttataaaccaaagatggccagcacactgctaaccagtcaccaaatgtaagacccataagaaacccatatttaaaaatctgaattttttagaagaatgcaaaactttagtaaaccctaagtaaagtcaaaatggagaaggggaaatatacagatggctagttgcataaaattaaattttacctttataagacaatggtgaaatctggcttgaacttgcttatgtgtttaacctataaatattggggtcttctgtctaaactggggtcactgttgcatggaacattgttcttaatagttgagaattgcttttttgaaaattttcatgaaggaattttggtaatgactttgcttgcaggttttttggggtgttttgagaaagtggcatggaaacatgcagtagttaatgagtttctcttggtactgaacactattagaatatcattagtgatattttttctctttagagcatttttaatgcaactagcccctatattttaatgtaagagttactctgcaatctaagcaaagcacccaacaatggtaaatgttttttaaaaatgcagaactaagatttttgactctaaagagagaaaattacaagggtgttgccttatagcaaacccttgggacaatccttcatgtgagcaaagtgttgatcttaatattggttgtctgtggtgtgcttttttgtactgtaaaaatatgtggttcatgtctaactctgctgttttattgtggttgtggttcaagtttttaatgtttaaagttgatgctgttttcagaagagctttttactaatttatttgtcagtgttccctatttgttacttaaccatgatcctccagattttttggagtattcttttctaaccttaaccctgccaaaccttgatccattttgacatttgttatgcactatttttatatctctgtgagagatttttccaacagtcagctattttatggcacactttttttgactgatgacatctcctttgctatacctcaatttttggaatttagagaagaaatcagtagttttgcaatgttaattatttagatatttaatttcgcagatttttaaactttattttcataatttctgcttaatgtttaaaattgaagagccttttcatgtattaaataatgaacacaaattatataattaaaataattggagatgttgaaaatcattttcccttcttaaacagaaataaatatttggaatgaaggggaatgtactagaacaccctttttgccacgggtaaaaataacagaaatgtatggtttgttttaccttcatttctgtacaagtaaagcttattagtctaatgttttgttcctttcccacctcacccctacctcttttgttttgttttgtttttgccctttatgtactacattcttattttctaacttttaaacactgtattggaggtttttttttaatttacagatcatatttattttactatttttgtagaaaattattaattttgattgtatttttgtattttaaaagcttcttcacttgtgttccctaaatattcatattgctgcccaaaagtatgactgtggaggaaaaaaaaatactttaaaaatccacactttttgttaagaaggaaacatttagcatttatatatttgtgtatggaaaacacttgatattttatccctgttgcatctggctgcacagagcctctcctcaaagatgctacaaaacttgaatataacacattttggaaggctgactaacctcgattctgtgttgtgatgtgcaatactgtttctaatgtttgtataaaaaaaaacagtgtaaacctttttaatgcaaatttatttttttcattgcatattttgcagattttatccacagtgtcattttttactgtcagaaaagataccccttttgtcattgcaactattttttaaatccagaaatctttgtactgatgtaaatgattgtagttattttggatagtgttttgctaacaaaaggagagacttttttcatgcatatttctattttgtttttttgggttttattttattttaatagtagtaaaatacttggaataatttttcatattcttgtcattaatattattttgtatttttatgtggaaatatataattttatgacactaattgctaaagtttattttatgttgaattatttttggagctgaaatctttgtaatattaaagcaactagtttctaattcccagtttctgtatagaatcgcacaagtggtttatggagtgtttggattgtaattataaatggttctttgatatgcaaattaatattttcagttgattttattttatattcctaatggggtgttaaagccgttttttatttttttctaaataaaaagagaacccatgcttttatggacactaggtaaacaccttcagcttaaatttttcgttaaatattttagtttattttattgttatcttccaggtgtctaaatctccagtctgtctgttgtactggtaatttaactctgtaatggaatagtttgctgccaactatttatattaagtaatttttaaatatttgtaatattgttgactgactaataaactattaagttattggc

SEQ ID NO: 56 - DNA, 3969 bp, Homo sapiens
gaagcccaggctctccttagttgactgtgtgttaatcacccagcaatttcattactcaacagctctccagagttgcacattacagctggggtagaaattgggtgctgaaggccaggcagagcatttggctgtagggaggccgatcctcctcgggcctgttaccggcgggtctttgttcttagacctggggttcttggcctcacggattccaaggaatggaacgttgggccatgcgtgtgaacgagctctatgtcgatgacccagacaaggacagcggtggcaagatcgacgtcagtctgaacatcagtttacccaatctgcactgcgagttggttgggcttgacattcaggatgagatgggcaggcacgaagtgggccacatcgacaactccatgaagatcccgctgaacaatggggcaggctgccgcttcgaggggcagttcagcatcaacaaggtatggaagccctgcctcagccctttctacctgctcccctttcctgctgtctccccgctccctggaaactggttgtggaggcactcactcgacctgaccctgacacagcccccagcaagcgagggttcgtgtccagctgcctggccgttcctgctgagaatctggatgggggtccaggctccctggggttttaagcccctgatggctggttcaggaaggagctactcttctctccagtgagggggacaatgatgagaagacctgaggatttgcagcccccagccctgggttcaagtcccagctctaccccttcttggcccctacaagtcacttgacccatcttaggctgagggtgtgatggcgataatagtatcacgataccacccacttcacaaagtttgtgtggggattaaatgagctaatgcagattcattcattcagaaaaatttttgaatggcacgttctgtgttccagggtcggtgataggctctggggcagcgttcctgggctggtggggctcccattctggtagagggagacagtctacaaaccagaaagcatcagggatgctaagtgcagtgatgaggaataaagccaaggggagtgagatgaggtgggcttgaaagtaccttgtccgctcagaaggaccattcaaggttcactgttgttttgtcctcagaaccaggagcttcagatcctaagtcaagtgggtgaacgcagtgcccttgggagggccgaggcacccggtggcagctggcagggttttgctcagcacgtgccggccttcctcgaagctcggtactgtcacagtggagcctctcaacaacgctgtgaggcagcaccatttgacaggttaggatgctggggcccagagaggttaagtgtcttgcccgaggtcacacagctatctgcatgtcccacaactccccttcccagccccagccaaactgagccactggccactcctggcttctccttgtccctcctgcagcctctgctcagaacgcccttcctccagaccctgacacctgagctggggttgcaaagtcactggccacatccagcccaaagataaattttgtttgtccagtatagcatttaactgcatcagaaccagtatgaaaagaccaggaatccagatttctggcttttaaaagtcagaggctctcactacactgggtccgtgttcccgctatgacaatgacctggcaccaatgggcagtgttcccctttagagagggtgtgtgctgtcccttcccacagtccctggcaggcggctggaaggccaggcctggtcatctgtcaagcagggtggacttcttacgtgacagttcagggctcccttaagtgctaaagcagaagctgcaaggctttcttaaggtttcgagtgttgctgggagaaatctgctgcatgttgtgggttaaagggagtctctcaccagcccaggccctcaggaggaggagataccaggaggcagggatgctgggggtcgtggttcactgggggctctctctgcccatgagctgccacacagcacctttgccatgccccgtaatttggattttatggtggttgtgatggaaagccatttgagggttttgaacagggaggcaatgtaatcagatttatgccttagaactggactatccaataggttgccaccagccacataaggctatttaaattaattcaaattaaatgtacaattcagtcactcattctcatcaaccacatttcaagtgctcaaagccacgtgctggctaggggccacagcgttagacagtgcagagagaaagcacttccatcgctgaggaaagttctgctggaccgcacacccttagaaggatggctctggtggccgggcgcggtggctcaaacctgtaatcccagcactttgggaggccgaggtgggtggatcacgaggtcaggagatcgagaccatcccggctaacatggtgaaaccctgcctctactaaaaatacaaaaaaaaacaaaattagccgggcgtggttgcgggcacctgtagtcccagctactcaggaggctgaggcgggagaatggcatgaacccgggaggtggagcttgcagtgagccaagatcgtaccactgcactccagtctgggcgacagagtgagactccatctcaaaacaaacaaaaaaaggatggggctgggctggagagggtggcaggcagtggttgtggcagtggagctggggagatgtggtcggattagggaggtagaatcaataagactcagtgaagaatcggatgtgggggtaagggcacatgtggaagcaaagaaacctttgacgtctttgtcttgacaaccgggtggtcctgtttctagacatggaagcttagaaaagcctggagtctgtgggaagtaggtagggctgggcactggtcattccactctggtttcctttggggttcccattaggtgtctacagggagaggtgaaattggaagttggaggtgtggagagttcaggagagggttctggaccacagatgttgaggtgggagtcattagtgaatagatgatgttggaagtcatgggtcctcagagtgggggctccttaagcctccaggccagcagcatcagcatcacctgggagattgttaggaatgcagattctcaggcccccctaagacccaccgactctgtgctagaacaagcgcccctcagagattctgatgccactgaagtttgaggagcattggtttaagcaagattacctacggagaggctgtagatccgtgttctaaacctggggtccacagacacccccaagaagagcggattgaatgcaagagatctatgaagttggatgggggaaaaattgacatctttatttttgctaaactcgatctaaagtttagcatttccatctgcgatgaatgtaggccacaaaccacagtagtattagcagtgcctgggacctcctcaacaacagaaattgccggtatttatagcacgttacagttgttgcagataatttccagagactgtttatatgcaccactgttttaaaattacggtgattggccaggtgcagtggctcacacctgtaatcccagcactttgggaggccaaagtgggtggatcacttgaggagttcaagaccagcctggtcaacatgtcaaaaccctgtatctacaaaaaaatacaaaagttaaccaagcctatgcttgtagtcacagctactcgggaggccgaggtgggagggtcttctgagcccagggaggtagaggcttcagtgagctgagatcgcaccaccacactccagcctgggtgacagagtgaaacccttaatcaatcagtcaataaaaattacagtaattattagacccaccactaggtcatcttatttgatgcatcagtaaagcagcatattcaaatgtggatttttaaatattttaattactatttaaatatctctttactttgtaatcctatgcattttacgcattaaaacattttaagcatttaaaaaaaaaaaaaaaaaaaaa

SEQ ID NO: 57 - DNA, 2390 bp, Homo sapiens
agagggagacggacgttgagagaacgaggaggaaggagagaaaatggcgtccacggattacagtacctatagccaagctgcagcgcagcagggctacagtgcttacaccgcccagcccactcaaggatatgcacagaccacccaggcatatgggcaacaaagctatggaacctatggacagcccactgatgtcagctatacccaggctcagaccactgcaacctatgggcagaccgcctatgcaacttcttatggacagcctcccactggttatactactccaactgccccccaggcatacagccagcctgtccaggggtatggcactggtgcttatgataccaccactgctacagtcaccaccacccaggcctcctatgcagctcagtctgcatatggcactcagcctgcttatccagcctatgggcagcagccagcagccactgcacctacaagaccgcaggatggaaacaagcccactgagactagtcaacctcaatctagcacagggggttacaaccagcccagcctaggatatggacagagtaactacagttatccccaggtacctgggagctaccccatgcagccagtcactgcacctccatcctaccctcctaccagctattcctctacacagccgactagttatgatcagagcagttactctcagcagaacacctatgggcaaccgagcagctatggacagcagagtagctatggtcaacaaagcagctatgggcagcagcctcccactagttacccaccccaaactggatcctacagccaagctccaagtcaatatagccaacagagcagcagctacgggcagcagagttcattccgacaggaccaccccagtagcatgggtgtttatgggcaggagtctggaggattttccggaccaggagagaaccggagcatgagtggccctgataaccggggcaggggaagagggggatttgatcgtggaggcatgagcagaggtgggcggggaggaggacgcggtggaatgggcagcgctggagagcgaggtggcttcaataagcctggtggacccatggatgaaggaccagatcttgatctaggccctcctgtagatccagatgaagactctgacaacagtgcaatttatgtacaaggattaaatgacagtgtgactctagatgatctggcagacttctttaagcagtgtggggttgttaagatgaacaagagaactgggcaacccatgatccacatctacctggacaaggaaacaggaaagcccaaaggcgatgccacagtgtcctatgaagacccacccactgccaaggctgccgtggaatggtttgatgggaaagattttcaagggagcaaacttaaagtctcccttgctcggaagaagcctccaatgaacagtatgcggggtggtctgccaccccgtgagggcagaggcatgccaccaccactccgtggaggtccaggaggcccaggaggtcctgggggacccatgggtcgcatgggaggccgtggaggagatagaggaggcttccctccaagaggaccccggggttcccgagggaacccctctggaggaggaaacgtccagcaccgagctggagactggcagtgtcccaatccgggttgtggaaaccagaacttcgcctggagaacagagtgcaaccagtgtaaggccccaaagcctgaaggcttcctcccgccaccctttccgcccccgggtggtgatcgtggcagaggtggccctggtggcatgcggggaggaagaggtggcctcatggatcgtggtggtcccggtggaatgttcagaggtggccgtggtggagacagaggtggcttccgtggtggccggggcatggaccgaggtggctttggtggaggaagacgaggtggccctggggggccccctggacctttgatggaacagatgggaggaagaagaggaggacgtggaggacctggaaaaatggataaaggcgagcaccgtcaggagcgcagagatcggccctactagatgcagagaccccgcagagctgcattgactaccagatttattttttaaaccagaaaatgttttaaatttataattccatatttataatgttggccacaacattatgattattccttgtctgtactttagtatttttcaccatttgtgaagaaacattaaaacaagttaaatggtagtgtgcggagtttttttttcttccttcttttaaaaatggttgtttaagactttaacaatgggaaccccttgtgagcatgctcagtatcattgtggagaaccaagagggcctcttaactgtaacaatgttcatggttgtgatgttttttttttttttttaaaataaaattccaaatgtttaataaaaaaaaaaaaaaaaaaa

SEQ ID NO: 58 - DNA, 1283 bp, Homo sapiens
ctctctgctcctcctgttcgacagtcagccgcatcttcttttgcgtcgccagccgagccacatcgctcagacaccatggggaaggtgaaggtcggagtcaacggatttggtcgtattgggcgcctggtcaccagggctgcttttaactctggtaaagtggatattgttgccatcaatgaccccttcattgacctcaactacatggtttacatgttccaatatgattccacccatggcaaattccatggcaccgtcaaggctgagaacgggaagcttgtcatcaatggaaatcccatcaccatcttccaggagcgagatccctccaaaatcaagtggggcgatgctggcgctgagtacgtcgtggagtccactggcgtcttcaccaccatggagaaggctggggctcatttgcaggggggagccaaaagggtcatcatctctgccccctctgctgatgcccccatgttcgtcatgggtgtgaaccatgagaagtatgacaacagcctcaagatcatcagcaatgcctcctgcaccaccaactgcttagcacccctggccaaggtcatccatgacaactttggtatcgtggaaggactcatgaccacagtccatgccatcactgccacccagaagactgtggatggcccctccgggaaactgtggcgtgatggccgcggggctctccagaacatcatccctgcctctactggcgctgccaaggctgtgggcaaggtcatccctgagctgaacgggaagctcactggcatggccttccgtgtccccactgccaacgtgtcagtggtggacctgacctgccgtctagaaaaacctgccaaatatgatgacatcaagaaggtggtgaagcaggcgtcggagggccccctcaagggcatcctgggctacactgagcaccaggtggtctcctctgacttcaacagcgacacccactcctccacctttgacgctggggctggcattgccctcaacgaccactttgtcaagctcatttcctggtatgacaacgaatttggctacagcaacagggtggtggacctcatggcccacatggcctccaaggagtaagacccctggaccaccagccccagcaagagcacaagaggaagagagagaccctcactgctggggagtccctgccacactcagtcccccaccacactgaatctcccctcctcacagttgccatgtagaccccttgaagaggggaggggcctagggagccgcaccttgtcatgtaccatcaataaagtaccctgtgctcaacc

SEQ ID NO: 59 - DNA, 6053 bp, Homo sapiens
gaaattttgagaagtggtgggatgaagaagatccctgaagagaggagtaactgagacaaaggcgaggctagcaatagagagacaagtgagggaattagacctttggtatcatcatgaaaaggcctggaagaaacgctggtttatcctgcggagtggccggatgagcggtgacccagatgttctggaatactacaagaacgatcactccaagaagcctctgcggatcatcaacctgaacttctgtgagcaggtagatgcaggcctgacctttaacaagaaggagctgcaggatagttttgtgtttgacatcaagaccagtgaacgcaccttttacctggtggctgagacagaagaggacatgaataagtgggtccagagcatctgccagatctgtggcttcaatcaggctgaggagagcacagactccctgagaaatgtttcctcagccggtcatggcccccgctcttctccagctgagctcagcagctctagccagcaccttctccgagagcgcaagtcctcagccccatcacactccagccagccaactctgttcacgtttgaaccccctgtgtcaaaccacatgcagcccaccttgtccaccagcgcacctcaggagtatctctacttgcaccagtgcataagccgaagagcagaaaatgcaaggagtgccagcttctctcagggcaccagagcctcttttctcatgaggagtgacacagctgtacaaaaacttgcccagggcaatggacactgtgtcaacgggatcagtggtcaagtccatggcttctatagccttcccaagccgagccggcacaatacagaattcagagacagtacctacgacctcccccgcagcctggcctcccatggccacaccaagggcagcctcacaggctccgagacagataatgaggatgtgtacaccttcaagacgcccagcaacaccctgtgcagggagttcggggacctcctggtagacaatatggatgttccggccaccccactctcagcctaccagatccctaggacattcactctggacaaaaaccacaatgccatgacagtggccactcctggggactcagccatagctcccccaccccgcccccccaagccaagtcaggcagaaacacctcgatggggcagtcctcagcagagaccgccaatcagtgaaaatagcagatctgtcgctgccaccatccccagacgcaacaccctccctgcaatggacaacagccgacttcaccgagcttcttcctgtgagacctacgagtacccacagcgtggtggagagagtgcaggccggtctgctgaatccatgagtgatggagttggctctttcctgccagggaaaatgattgtgggccgatcggacagcaccaattctgaagacaactatgtgcccatgaatccaggttcttccaccctgttggccatggaacgagcaggtgataattcccagagcgtctacatcccaatgagcccaggggcccatcactttgactcacttggctacccatcaacaacccttcctgtgcaccgaggccccagcagaggaagtgagattcagccaccccctgtcaaccgcaacctcaaacctgatcggaaagcaaagccaacaccacttgacctgaggaacaacaccgtcatcgatgaactccccttcaagtcacctatcaccaagtcttggtctagggccaaccacaccttcaactccagctcctcccagtactgccgccccatctccacccagagcatcaccagcacagactcaggagacagcgaagagaactatgtccctatgcaaaacccagtgtctgcatctcccgttcccagtggcacgaacagtcctgcccctaagaagagcaccggcagcgttgattatctggccctggacttccagccgagctccccaagcccccaccgcaagccatctacttcatccgtcacctctgatgagaaggtggactacgttcaggtggacaaggagaagacccaggccctgcagaacaccatgcaggagtggacagacgtgcggcagtcctcagagccttccaagggtgccaagctgtgatgagagggccaccgcagagcccaggaggcagcatctccagagctggcccttcccatctcccctctcccctctcccgttcttcctcccatccacctcctctctactctgccagtctcagccttcaaagcacttgacatcagggaccctgaacccttcccctgggaggtgagggcctgatcaaggcacctcctctgcccactcggggcccagctgtgatttttatcagtaatggccatgcctccacccaccttagttaggagctacttccaaaaagcatccttcagcctcttcctgtcctttagacctgactctctaccagatgtttggagggaagggctggggctctgagccagattccacacctcacgttcagtcacagccctcagctatcttccctccggccactgggctacctctccttcagtcccagaagacaagtctcaccaacccagggagtcaaggaccagcaaaccaaagtggataatggactttttcattcctgtttttcttggcaggagagaagcaaggccactaaaagaggagatggtggagacggaggctcagcagtggtcttgaggggtaaaggacttagatgcccagatgaagagggaaagctgacatctgcagggaacccactttgaggctgaggccatggcaggacagctgctgtggggtgcagaggcagaagatgaaggacaaaaggaagggaaaactgatggccaacctagagcagcaaggagcagggcttggagctcgggtggtggagatgacaaggacactgtggggtctgggtccccagaactctggagctacaggccactctaggcccaagggctagtcctcttccccagtcccctcagaggcccccgccagccccaccttgaaagcagcatacaggggaaggcttggaccaagctgggcgaccaagcacatggggcaggaacacatggtaaaggggtggggaatatgggagggagtgtggtgtggatgggggtgatgcagggactgaggggaaccctgggacaggcacaggctgggcagaggcacagggcagtgcaggggactctgcagtggggtcgggaagtgagtttctttgcagtgagcagtgcagtggaagtcgggcacagaggtagcagacagatgtgaagcagtggtgaaggccatgtagcaagtggggaaatacatccaaagggcctgggagttggggggtgcccaacgcaatccttgggggtgcagggtggagcagaaagtgaaggagggacacgtgcaagagtggtgtgcatggtggtgtgacatgaggaccgttcctaggatgggacagtgggtcaggcaggacaaggagaaagcagggcagaatgatgcctagaggaccacatcaggcatggctgacagcttgtgcccatgggctgtggcgtatgtcagatcgcagggtaggaacgagtctggcctggtgccggcccagtgtttcctcagctcatccgccctctgttgctccctagcattccaggagccatcttggactctcctccccaggtttgaaaggccatcagattagcagggacggggtgtagggcatcacccaaggttccttctcttaaactaagggtgggggatctgaatgtttttatgttgactgttcttgactaaattttcaagagtttcagaagcaacaggacagaccagacgtttcattctaccctggggcgaacagaacttcttcctcccaaacaatgacttcctgccatgtttgatggggacagctaccactgtcctctgcccccattcccctttcagctcccatgagcatgcatagttcaccagaccaatggcctagccattctctaagtcccatcctggaagaagttatttcttcaagagctgcacctctcctcctagcattagtttagatcaactcaaggagtatttattaatggctgctgtctccagtttctggggttaagcactaaggacacaagaatcaatcagaccttctccctgaacttaagatagccacaatcagaaaaaggacaaggacatgagacagtggtgatggccatcagacagagacttcaaatgctgatggagggcagaggaagtacttagggaggttggtgtcagaggcaggagtgggggatcagggaaggtggattctaggaaaagggagtgcctgaggtaggccttagaaggggatgagtcagatttttacagaggaggagggcagggcttgggtccagtggaggaagaaggaaggagaggcttggaaagccttgtgtcttgggaaaaaaaggcctttgagcatatgggtccagccactcagaagtgcaggggccatgccttggtgttccaataagtgaatggaagcagtggtggtagctacactgggcagagttggcagggtgctggttcactctgcccagccctgaatgtgtgccttaaaggccccctacaaggggccccatacgacagagcttttaactggtgccttccctgtacccgcagcagccacaagtgggcccagactattgcagcctcccataaacatgtgagcatgttctgagtgtgccatgatgtgagtggacctggctggaatcttcggagagcgactgaggtgttcaaatcgaatctcccaggaggcttccttccagccccctattctggtaactaccaggaggcttccttccagccccctattctggtaactaccaaaatccctcgggtgcaagtgtaggggtagagatggaaggatgagaggtgaaattgaccttttgaaagcaaagctctggctcacaggccccaaactaccagccgtatctagcatatccccaccctccacccactacctcctccaacaaaggagtcaactcagttgaaaaaactggtcctttggcctatccatgggtcaaagtccacctctcctgggggcctggagaggactgagcctacggaaaggggataccttcccactcagcactgcttcacacaggccccctgcctggggctctccaaggagccttcttcacccacttccagctccacttctgcaaggttaagtcaagtgagaacgatgagaaatagggagatggtgtctccttaagtccttgatctgcctgtctgtggaatgggaggttggattagctgcgctgaggtcccatccacagctggtgctcagctgcttgaaggggagactccctcctctgtaacttctttctgggggattggggtgggcagtacctatccccagtcccctcctagcttgactttagtggtttccaatgtagaagttaacaaagtatgccccattcctgtgacaaaagcacaaccattctgaagttactggagcatgggctcagctcatcctccctctggccccttctcccatggggacatctcggcccagcacccctatcccatttccagagttcttccttccccatctgggccttcataaaatgcaggggaagccagactggtctcaggagcgctaaagcccttccgtggggggtcgtctttctgggactagccctgctgtttaggacctgggaccacaatggggtacctgccgagggggtccccaagagatccaggctgtcatgtgatttatggtggcatgtgttgtgtatttgttggctacttgtgtcttgaaatctagaattatttcacgcagaattgtcactgtttgtcaggaagagaaaatgggctagtggaagcccagtcttgagttcttgtcttgttaccatttaaaattgacatttaattttcaaatcactgttggtgcctaatcacttaagttattaatttattctgttgtattcttttttttaaattgtaacatatttatccggtgggtgggacaggagtgtgttcaagtgggtcatgtttttgctgtggtgacacatggtacaggcttggagcttgcaggtccctttctactgtggtgttggagcaggacaataaagtccactagaaatgcacccca

SEQ ID NO: 60 - DNA, 1393 bp, Homo sapiens
gcaggcattgtttgttcttgtcttggatttatgcctttaaatttcaccttttattacacagctatagcaggcctttttatgagactaacctggcctctccactaaaggatgtgtgactttctggggacagaagagtacagtccctgacatcacacactgcagagatggataaccaaggagtaatctactcagacctgaatctgcccccaaacccaaagaggcagcaacgaaaacctaaaggcaataaaagctccattttagcaactgaacaggaaataacctatgcggaattaaaccttcaaaaagcttctcaggattttcaagggaatgacaaaacctatcactgcaaagatttaccatcagctccagagaagctcattgttgggatcctgggaattatctgtcttatcttaatggcctctgtggtaacgatagttgttattccctctacattaatacagaggcacaacaattcttccctgaatacaagaactcagaaagcacgtcattgtggccattgtcctgaggagtggattacatattccaacagttgttactacattggtaaggaaagaagaacttgggaagagagtttgctggcctgtacttcgaagaactccagtctgctttctatagataatgaagaagaaatgaaatttctgtccatcatttcaccatcctcatggattggtgtgtttcgtaacagcagtcatcatccatgggtgacaatgaatggtttggctttcaaacatgagataaaagactcagataatgctgaacttaactgtgcagtgctacaagtaaatcgacttaaatcagcccagtgtggatcttcaataatatatcattgtaagcataagctttagaggtaaagcgtttgcatttgcagtgcatcagataaattgtatatttcttaaaatagaaatatattatgattgcataaatcttaaaatgaattatgttatttgctctaataagaaaattctaaatcaattattgaaacaggatacacacaattactaaagtacagacatcctagcatttgtgtcgggctcattttgctcaacatggtatttgtggttttcagcctttctaaaagttgcatgttatgtgagtcagcttataggaagtaccaagaacagtcaaacccatggagacagaaagtagaatagtggttgccaatgtctgagggaggttgaaataggagatgacctctaactgatagaacgttactttgtgtcgtgatgaaaactttctaaatttcagtagtggtgatggttgtaactctgcgaatatactaaacatcattgatttttaatcattttaagtgcatgaaatgtatgctttgtacacgacacttcaataaagctatccagaaaaaaaaaaaaaaaaa

SEQ ID NO: 61 - DNA, 1242 bp, Homo sapiens
atttcatgttatacttaataaaacaaaacatacctgtatacacacacattcactcacattgaagatgcaagatgaagaaagatacatgacattgaatgtacagtcaaagaaaaggagttctgcccaaacatctcaacttacatttaaagattattcagtgacgttgcactggtataaaatcttactgggaatatctggaaccgtgaatggtattctcactttgactttgatctccttgatcctgttggtttctcagggagtattgctaaaatgccaaaaaggaagttgttcaaatgccactcagtatgaggacactggagatctaaaagtgaataatggcacaagaagaaatataagtaataaggacctttgtgcttcgagatctgcagaccagacagtactatgccaatcagaatggctcaaataccaagggaagtgttattggttctctaatgagatgaaaagctggagtgacagttatgtgtattgtttggaaagaaaatctcatctactaatcatacatgaccaacttgaaatggcttttatacagaaaaacctaagacaattaaactacgtatggattgggcttaactttacctccttgaaaatgacatggacttgggtggatggttctccaatagattcaaagatattcttcataaagggaccagctaaagaaaacagctgtgctgccattaaggaaagcaaaattttctctgaaacctgcagcagtgttttcaaatggatttgtcagtattagagtttgacaaaattcacagtgaaataatcaatgatcactatttttggcctattagtttctaatattaatctccaggtgtaagattttaaagtgcaattaaatgccaaaatctcttctcccttctccctccatcatcgacactggtctagcctcagagtaacccctgttaacaaactaaaatgtacacttcaaaatttttacgtgatagtataaaccaatgtgacttcatgtgatcatatccaggatttttattcgtcgcttattttatgccaaatgtgatcaaattatgcctgtttttctgtatcttgcgttttaaattcttaataaggtcctaaacaaaatttcttatatttctaatggttgaattataatgtgggtttatacattttttacccttttgtcaaagagaattaactttgtttccaggcttttgctactcttcactcagctacaataaacatcctgaatgttttcttaaaaaa

SEQ ID NO: 62 - DNA, 4612 bp, Homo sapiens
gaggcattgaggcagccagcgcaggggcttctgctgagggggcaggcggagcttgaggaaaccgcagataagtttttttctctttgaaagatagagattaatacaactacttaaaaaatatagtcaataggttactaagatattgcttagcgttaagtttttaacgtaattttaatagcttaagattttaagagaaaatatgaagacttagaagagtagcatgagaaaggaaaagataaaaggtttctaaaacatgacggaggttgagatgaagcttcttcatggagtaaaaaatgtatttaaaagaaaattgagagaaaggactacagagccccgaattaataccaatagaagggcaatgcttttagattaaaatgaaggtgacttaaacagcttaaagtttagtttaaaagttgtaggtgattaaaataatttgaaggcgatcttttaaaaagagattaaaccgaaggtgattaaaagaccttgaaatccatgacgcagggagaattgcgtcatttaaagcctagttaacgcatttactaaacgcagacgaaaatggaaagattaattgggagtggtaggatgaaacaatttggagaagatagaagtttgaagtggaaaactggaagacagaagtacgggaaggcgaagaaaagaatagagaagatagggaaattagaagataaaaacatacttttagaagaaaaaagataaatttaaacctgaaaagtaggaagcagaagaaaaaagacaagctaggaaacaaaaagctaagggcaaaatgtacaaacttagaagaaaattggaagatagaaacaagatagaaaatgaaaatattgtcaagagtttcagatagaaaatgaaaaacaagctaagacaagtattggagaagtatagaagatagaaaaatataaagccaaaaattggataaaatagcactgaaaaaatgaggaaattattggtaaccaatttattttaaaagcccatcaatttaatttctggtggtgcagaagttagaaggtaaagcttgagaagatgagggtgtttacgtagaccagaaccaatttagaagaatacttgaagctagaaggggaagttggttaaaaatcacatcaaaaagctactaaaaggactggtgtaatttaaaaaaaactaaggcagaaggcttttggaagagttagaagaatttggaaggccttaaatatagtagcttagtttgaaaaatgtgaaggactttcgtaacggaagtaattcaagatcaagagtaattaccaacttaatgtttttgcattggactttgagttaagattattttttaaatcctgaggactagcattaattgacagctgacccaggtgctacacagaagtggattcagtgaatctaggaagacagcagcagacaggattccaggaaccagtgtttgatgaagctaggactgaggagcaagcgagcaagcagcagttcgtggtgaagataggaaaagagtccaggagccagtgcgatttggtgaaggaagctaggaagaaggaaggagcgctaacgatttggtggtgaagctaggaaaaaggattccaggaaggagcgagtgcaatttggtgatgaaggtagcaggcggcttggcttggcaaccacacggaggaggcgagcaggcgttgtgcgtagaggatcctagaccagcatgccagtgtgccaaggccacagggaaagcgagtggttggtaaaaatccgtgaggtcggcaatatgttgtttttctggaacttacttatggtaaccttttatttattttctaatataatgggggagtttcgtactgaggtgtaaagggatttatatggggacgtaggccgatttccgggtgttgtaggtttctctttttcaggcttatactcatgaatcttgtctgaagcttttgagggcagactgccaagtcctggagaaatagtagatggcaagtttgtgggtttttttttttacacgaatttgaggaaaaccaaatgaatttgatagccaaattgagacaatttcagcaaatctgtaagcagtttgtatgtttagttggggtaatgaagtatttcagttttgtgaatagatgacctgtttttacttcctcaccctgaattcgttttgtaaatgtagagtttggatgtgtaactgaggcgggggggagttttcagtatttttttttgtgggggtgggggcaaaatatgttttcagttctttttcccttaggtctgtctagaatcctaaaggcaaatgactcaaggtgtaacagaaaacaagaaaatccaatatcaggataatcagaccaccacaggtttacagtttatagaaactagagcagttctcacgttgaggtctgtggaagagatgtccattggagaaatggctggtagttactcttttttccccccacccccttaatcagactttaaaagtgcttaaccccttaaacttgttattttttacttgaagcattttgggatggtcttaacagggaagagagagggtgggggagaaaatgtttttttctaagattttccacagatgctatagtactattgacaaactgggttagagaaggagtgtaccgctgtgctgttggcacgaacaccttcagggactggagctgcttttatccttggaagagtattcccagttgaagctgaaaagtacagcacagtgcagctttggttcatattcagtcatctcaggagaacttcagaagagcttgagtaggccaaatgttgaagttaagttttccaataatgtgacttcttaaaagttttattaaaggggaggggcaaatattggcaattagttggcagtggcctgttacggttgggattggtggggtgggtttaggtaattgtttagtttatgattgcagataaactcatgccagagaacttaaagtcttagaatggaaaaagtaaagaaatatcaacttccaagttggcaagtaactcccaatgatttagtttttttccccccagtttgaattgggaagctgggggaagttaaatatgagccactgggtgtaccagtgcattaatttgggcaaggaaagtgtcataatttgatactgtatctgttttccttcaaagtatagagcttttggggaaggaaagcattgaactgggggttggtctggcctactgggctgacattaactacaattatgggaaatgcaaaagttgtttggatatggtagtgtgtggttctcttttggaatttttttcaggtgatttaataataatttaaaactactatagaaactgcagagcaaaggaagtggcttaatgatcctgaagggatttcttctgatggtagcttttgtattatcaagtaagattctattttcagttgtgtgtaagcaagtttttttttagtgtaggagaaatacttttccattgtttaactgcaaaacaagatgttaaggtatgcttcaaaaattttgtaaattgtttattttaaacttatctgtttgtaaattgtaactgattaagaattgtgatagttcagcttgaatgtctcttagagggtgggcttttgttgatgagggaggggaaacttttttttttctatagacttttttcagataacatcttctgagtcataaccagcctggcagtatgatggcctagatgcagagaaaacagctccttggtgaattgataagtaaaggcagaaaagattatatgtcatacctccattggggaataagcataaccctgagattcttactactgatgagaacattatctgcatatgccaaaaaaattttaagcaaatgaaagctaccaatttaaagttacggaatctaccattttaaagttaattgcttgtcaagctataaccacaaaaataatgaattgatgagaaatacaatgaagaggcaatgtccatctcaaaatactgcttttacaaaagcagaataaaagcgaaaagaaatgaaaatgttacactacattaatcctggaataaaagaagccgaaataaatgagagatgagttgggatcaagtggattgaggaggctgtgctgtgtgccaatgtttcgtttgcctcagacaggtatctcttcgttatcagaagagttgcttcatttcatctgggagcagaaaacagcaggcagctgttaacagataagtttaacttgcatctgcagtattgcatgttagggataagtgcttatttttaagagctgtggagttcttaaatatcaaccatggcactttctcctgaccccttccctaggggatttcaggattgagaaatttttccatcgagcctttttaaaattgtaggacttgttcctgtgggcttcagtgatgggatagtacacttcactcagaggcatttgcatctttaaataatttcttaaaagcctctaaagtgatcagtgccttgatgccaactaaggaaatttgtttagcattgaatctctgaaggctctatgaaaggaatagcatgatgtgctgttagaatcagatgttactgctaaaatttacatgttgtgatgtaaattgtgtagaaaaccattaaatcattcgaaataataaactatttttattagagaatgtaaaaaaaaaaaaaaaaaaaaaaaaaaa

SEQ ID NO: 63 - DNA, 620 bp, Homo sapiens
ttttttttttttttttatgtcagaagtttattttattggtaaaatattaaataatatacagaattaaaaactgcacttacacttctgagaagaaataaatcttggacaaattatatgcttgttcctgagattccctaaatttattccagtagctgtgcactcagacagtacaaacctttataatataatccttttcacaaagtattacaaagtttctgcagcttctttagttgtacacacatacagacacacactcacacatgcatatacaacactcatacacatatacacagtaaccacatacatgcacagaacatgtatgtgtgtgcattaaaaacaaagaagatacaagtcccacattttagtctgcagtgataaaactatttagcggaggtctccaaatcagtatgtagtagagtgacttgtcacacagctgcaaagactgtttcagtatttccatagtaaacctcattttctgaggtatggtatttgagccttaaaaaaaactacattacacttagcatacctgacatacaaggtatgggattttaacttgacatatatatttatatatatatatatatatatatgtcttttttaaacactaggttttatttccc

SEQ ID NO: 64 - DNA, 8648 bp, Homo sapiens
cagggagggacgcccccgccgacaggagaattggttcccgggcccgcggcgatgcccccccggtagctcgggcccgtggtcgggtgtttgtgagtgtttctatgtgggagaaggaggaggaggaggaagaagaagcaacgatttgtcttctcggctggtctccccccggctctacatgttccccgcactgaggagacggaagaggagccgtagccaccccccctcccggcccggattatagtctctcgccacagcggcctcggcctccccttggattcagacgccgattcgcccagtgtttgggaaatgggaagtaatgacagctggcacctgaactaagtacttttataggcaacaccattccagaaattcaggatgaatggggatatgccccatgtccccattactactcttgcggggattgctagtctcacagacctcctgaaccagctgcctcttccatctcctttacctgctacaactacaaagagccttctctttaatgcacgaatagcagaagaggtgaactgccttttggcttgtagggatgacaatttggtttcacagcttgtccatagcctcaaccaggtatcaacagatcacatagagttgaaagataaccttggcagtgatgacccagaaggtgacataccagtcttgttgcaggccgtcctggcaaggagtcctaatgttttcagggagaaaagcatgcagaacagatatgtacaaagtggaatgatgatgtctcagtataaactttctcagaattccatgcacagtagtcctgcatcttccaattatcaacaaaccactatctcacatagcccctccagccggtttgtgccaccacagacaagctctgggaacagatttatgccacagcaaaatagcccagtgcctagtccatacgccccacaaagccctgcaggatacatgccatattcccatccttcaagttacacaacacatccacagatgcaacaagcatcggtatcaagtcccattgttgcaggtggtttgagaaacatacatgataataaagtttctggtccgttgtctggcaattcagctaatcatcatgctgataatcctagacatggttcaagtgaggactacctacacatggtgcacaggctaagtagtgacgatggagattcttcaacaatgaggaatgctgcatcttttcccttgagatctccacagccagtatgctcccctgctggaagtgaaggaactcctaaaggctcaagaccacctttaatcctacaatctcagtctctaccttgttcatcacctcgagatgttccaccagatatcttgctagattctccagaaagaaaacaaaagaagcagaagaaaatgaaattaggcaaggatgaaaaagagcagagtgagaaagcggcaatgtatgatataattagttctccatccaaggactctactaaacttacattaagactttctcgtgtaaggtcttcagacatggaccagcaagaggatatgatttctggtgtggaaaatagcaatgtttcagaaaatgatattccttttaatgtgcagtacccaggacagacttcaaaaacacccattactccacaagatataaaccgcccactaaatgctgctcaatgtttgtcgcagcaagaacaaacagcattccttccagcaaatcaagtgcctgttttacaacagaacacttcagttgctgcaaaacaaccccagacttctgtggtacagaatcaacaacagatatcacaacagggacctatatatgatgaagtggaattggatgcattggctgaaattgagcgaatagagagagaatcagctattgaaagggagcgcttctcaaaagaagttcaagataaagataagcctttgaaaaaaagaaaacaagattcttacccacaggaggctgggggtgctacaggaggtaatagaccagcttctcaggagacgggttctacgggaaatgggtcaaggccagcattaatggttagcattgatcttcatcaggcaggaagagtggactctcaggcttctataactcaggattcagactccataaaaaagcctgaagaaatcaaacaatgtaatgatgcacctgtttctgttcttcaggaagatattgttggaagtcttaaatctacaccagaaaaccatcctgagacacctaaaaaaaagtctgatcctgagctttcaaagagtgaaatgaaacaaagtgaaagtagattagcagaatctaaaccaaatgaaaaccgattggtggagacaaaatcaagtgaaaataagttagaaactaaagttgagacccaaacagaagaacttaaacagaatgagagcagaacaactgaatgcaaacaaaacgagagcaccatagttgagcctaaacaaaatgaaaatagactgtctgacacaaaaccaaatgacaacaaacaaaataatggcagatcagaaacaacaaaatcaaggcctgaaaccccaaagcaaaagggtgaaagccggcctgagactccaaaacaaaagagtgatgggcatcctgaaaccccaaaacagaagggtgatggaaggcctgaaactccaaagcaaaaaggtgagagccgccctgaaactccaaagcaaaaaaatgaagggcgacctgaaacaccaaaacacaggcatgacaataggagggattctggaaagccatctacagagaaaaaacctgaagtgtctaaacataaacaagatactaaatctgactcacctcggttaaaatcagaacgagctgaagccttaaagcagagacctgatgggcgatctgtttctgagtcactaagacgtgaccatgataataaacaaaaatcagatgacaggggtgaatcagagcgacatcgaggggatcagtctagggttcgaagaccagaaacattgagatcctctagtagaaatgaacatggcattaaatctgatagttcaaaaactgataaactagaacgaaaacacaggcatgaatcaggggactcaagggaaagaccatcttctggggaacaaaaatcaagacctgacagtcctcgtgttaaacaaggagattctaataaatcaagatctgataaacttggttttaaatcaccaactagtaaagatgacaaaaggacagagggtaacaagagtaaagtagacactaataaagcacaccctgacaataaggcagaatttccaagttatttgttggggggcaggtctggtgcgttgaaaaattttgtcattccgaaaatcaagagggataaagatggcaatgttactcaggagacaaagaaaatggaaatgaaaggagagccgaaagacaaagtagaaaaaataggattagttgaagatctaaataaaggagctaagcctgtagttgtgctacaaaaactgtctttggatgatgttcagaaacttattaaagatagagaggacaaatcaagaagttcccttaaacctatcaagaataaaccatcaaagtcaaataaaggtagtatagatcaatcagtgttaaaagaattaccccctgaactcctggcagaaattgagtccaccatgccactttgtgaacgtgtgaaaatgaacaaacgcaagcgtagcacagttaatgaaaagccaaaatatgctgaaatcagttcagatgaagataatgatagtgatgaagcttttgaatcctctaggaaacgacataaaaaagatgatgataaagcttgggaatatgaagagcgtgacagaagaagctctggggatcataggagaagtggccactctcatgaaggaagaaggagttcaggtggtggtcgttatcgaaaccgaagtccgtcagattctgacatggaagattattctcctcctcccagccttagtgaggttgctaggaaaatgaagaaaaaagaaaaacagaagaaaaggaaagcatatgaaccaaaactaacacctgaagaaatgatggactcttcaacttttaagagattcacagcctcaatagagaatattttggataatttggaagatatggattttactgcgtttggtgatgatgatgaaattcctcaggaactgctcttaggaaaacatcagcttaatgaacttggcagtgaatctgctaaaataaaagcaatgggtataatggataagctttcaactgacaaaactgtgaaagtcttaaatatcttggagaagaatattcaggatgggtcaaagctttccactttgttaaatcataataacgatactgaagaagaagaaaggttatggagagaccttattatggagagagttacaaaatcagcggatgcttgtcttacaactatcaacattatgacatcccctaacatgccaaaagctgtgtacattgaggatgtaattgaaagagttatacagtacactaaatttcatttgcagaatacactttatcctcagtatgatcctgtttacagattagatcctcatggaggaggcttattaagttcaaaagcaaaacgggctaaatgttctacccataagcagagagtaatagtaatgctttataacaaagtttgtgacattgttagcagcttatcagaattgctagagatacaacttcttacagacacaacaattcttcaggtttcatctatgggaataacaccattttttgtggaaaatgtcagtgaactacagttgtgtgccattaagttagtcactgcagtattctcaagatatgaaaaacataggcagttaattttggaagaaatttttacttcacttgcaagattaccaaccagcaagaggagtttaaggaacttcaggttaaacagtagtgatatggatggagaacctatgtatattcagatggttacagcactggttttacaacttattcagtgtgtggtacacttaccatcatcagagaaggactctaatgcagaagaagattcaaataaaaaaattgaccaggatgttgtcattactaactcttatgaaacagctatgcgaacagcccaaaacttcctctccatcttccttaaaaaatgtggtagtaagcaaggtgaagaagattacagaccactgtttgaaaattttgttcaagaccttctttcaacagtcaataagcctgaatggccagctgctgaactactccttagtttgttagggagactgttggttcatcagttcagtaacaagtcaacagagatggctttaagagtggcatctcttgattaccttggaactgttgctgcacggctaagaaaagatgctgttacaagcaaaatggatcaaggatctatagaacgcattttaaaacaggtttcaggaggggaagatgaaatccaacaattacaaaaagcattgcttgattacttggatgaaaacactgagactgatccttcactagtgttttctcgtaaattctatatagcccagtggtttcgagacacaactctggaaacagaaaaagcaatgaaatcacaaaaagatgaagaatcatctgaaggaacacatcatgcaaaggaaattgagacaactggccaaattatgcatcgagctgaaaaccgaaaaaagtttcttagaagcattatcaaaaccacaccttctcagtttagcacattaaagatgaactctgatactgtggactatgatgatgcttgcttgattgttcgatacttggcctccatgaggccgtttgcccagagctttgatatttatttgacacagatcctacgagttcttggtgaaaatgcaattgctgttcgaacaaaagccatgaagtgtttgtctgaggttgttgctgtagaccccagtattctagcaaggcttgatatgcaacgaggtgttcatggacgattgatggataattcgactagtgtccgagaagcagcagtagaattactaggtcgatttgtcctttgtcgacctcagcttgctgaacagtattatgatatgctgattgaaagaatattggatactggtatcagtgtcaggaaaagagtaataaagattctcagagacatttgtattgaacaaccaacatttccaaaaatcacagaaatgtgtgtaaaaatgattcgcagagtcaatgatgaagagggcattaagaaattagtaaatgaaacattccagaaactctggtttactccaactccacacaatgacaaagaagcaatgacaaggaaaattttaaacattaccgatgtggttgcagcatgcagagatactggatatgactggtttgagcaactgcttcaaaacttgttgaagtccgaagaggattcctcatataaacctgtgaagaaagcttgtactcaacttgttgataacctagttgagcacattcttaaatatgaggaatctctagctgactctgacaataaaggtgtgaattctggaagattggtagcttgcataaccactttgttcttattcagcaaaataagaccccagctcatggttaaacatgcaatgactatgcaaccataccttaccactaaatgtagtacgcaaaatgatttcatggttatctgcaatgttgcaaaaatcctagagctagttgtaccactgatggagcatccaagtgaaacttttcttgccactattgaggaagatctaatgaagctcatcatcaaatatggcatgactgtagtgcaacattgtgtgagctgtcttggagctgttgtaaataaagtgacacaaaattttaaatttgtgtgggcttgtttcaatagatactatggtgccatttcaaaattaaaaagtcaacaccaagaggacccaaataacacttcacttctaacaaacaaaccagcacttcttagatcccttttcaccgttggagcactatgtcggcattttgattttgatctggaagattttaaaggcaacagcaaggttaacataaaagataaagtacttgaactattgatgtattttacaaaacactcagatgaagaagtacaaacaaaagctatcattggtctaggatttgcctttattcagcatccaagtctaatgttcgagcaagaagtgaagaatctatataataatattttatctgataagaactcctcagtcaatttaaaaatacaagtgttaaaaaacctccagacctacctacaagaagaagatacacgtatgcagcaggcagatagagactggaagaaagttgcaaaacaggaagacttaaaagaaatgggtgatgtttcctcagggatgagtagttccatcatgcagctttatctcaaacaggtgcttgaggcattttttcacacccagtcaagtgtacgccactttgccctaaatgtcattgcattgactctaaatcaaggtcttattcatccagttcagtgtgtgccatatttaattgctatgggcacagacccagaacctgctatgcggaacaaggctgatcagcaacttgtggaaatagacaaaaaatatgctggattcattcatatgaaagcagtggctggtatgaagatgtcttaccaggtacaacaggcaatcaacacatgcctaaaagatcctgtaaggggtttcagacaagacgagtcctctagcgctttgtgttcacacctttactccatgatccgtggaaaccgccaacacagacgagcctttcttatttctttactcaacctctttgatgacacagcaaaaacagacgtgactatgctcttgtatatagcagacaatctagcctgttttccataccagacacaggaagagccgttgtttataatgcatcatatagacattacactctcagtttctggtagtaacctactgcagtcattcaaggagtctatggtaaaggacaaaaggaaagagagaaaatcatcacctagtaaggaaaatgagtcaagcgacagtgaagaagaagtttccaggcctcggaagtcacggaaacgtgtagattcagattcagattcagattcagaagacgatataaattcagtgatgaaatgtttgccagaaaattcagctcctttaatcgaatttgcaaatgtgtcccagggtattttattacttctcatgttaaaacaacatttgaagaatctttgtggattttctgatagtaaaattcagaagtactctccatctgaatctgcaaaagtatatgataaagcgataaaccgaaaaacaggagttcattttcatccaaaacaaacactggacttcctgcggagtgacatggctaattccaaaatcacagaagaggtgaaaaggagtatagtaaaacagtatctagatttcaaacttctcatggaacatctggaccctgatgaagaagaagaagaaggggaggtttcagctagcacaaatgctcggaacaaagcaattacctcactgcttggaggaggcagccctaaaaataatacagcagcagagacagaagatgatgaaagtgatggggaggatagaggaggaggcacttcaggggtgaggcggaggaggagtcaacgtatttcgcagcgtattacgtaaaatgatttttatgtgcttatatatgtcagtctattaaatgtacaccaagtaatgtaatacttaaaagagaaaacattttgtagatagagattctctacttacccgtttatacatccttttgtagaaagtttaacataaaagacaataaaaaaacagaaatgagatttatccagcaaaaa

SEQ ID NO: 65 - DNA, 706 bp, Homo sapiens
aggcaccttacaacttcagaattcgaggaagatgatgtgaatcttccaattttatctatttgattcaaatggtatgttttttcacatttctcataatttccacgtcaactcccatgatgatcatgcaggaaagcagcatgattgcacttcttgtagtgcataccatcactaaaacatagttactgtctttctgtggtcttaagaaaaattcagaaacagcataccaatgtacatataagataaataagcttatgtggtacagtaagtgttctgttctgagaaataccttgattcgtatcctaatgtctgatgttattggtagttctcaaacttccccaattctgctttcatctaaattcatcttatctatctattgttaaataatctatcagtccatttttatctatcatctatatatctgtctttatcaatcattcgtctgtaatctatctgtgccgtttggcataagagacagaagggcatagcagtggaaactcaaaggagttacctccatgtgaatggacagtggtgatggtgatctgtgaggtggtgatgttatagaaagaaaaactagaagagagcatgccctaactcagggaccttgtccagcaggcactctggcttgttatactgtgctttgaatatgacccaaatttcaatagtgctgacatttttgcctcctgggccgaaaaaccttcctcctttt

SEQ ID NO: 66 - DNA, 265 bp, Homo sapiens
ttttttttttggttgcagacatttaaataatctatatttgtagggtgatatcttggagattactttactatcaatatatagaagtaataacctggtagatagcattacctatgaaaggtccatcccatctgctattcttgctgaaagcttttcatgcaccagtaaactcagtaaatatcagaagataaagcataagcctaccacgccacggatttactcctaatgtctcctcaaagtgcagcccgatgcaacgattacaaatgat

SEQ ID NO: 67 - DNA, 3366 bp, Homo sapiens
ggttgcgcgtgtgccatggactcagccgcccggtgatattgacaataggagagagaaaggggcattgactgggacccaccgcgggtagcgaaaggtggctctggcagcggcggctccagctcctgcggctcctcctccttattctgtccccttctcttgctgccgctgcagatccagtcttcctccctcccttccccccctccccacgtcgtcgccgccgccgccgggtccggggcaacgagctgaggcgccgcccgccaggaatgtgagcgaggagccaccggcggagccgcaacggggtcggtgccgatttgatgggacgggcccgcgggggaggatcgtgaggccgccgccgccaccggaacgctgaggttcgggtccggccgtgaggcctagaggctccgccgccgcggaaccggagggaccccgtaccggacagccgtcgccccaggctccccgcagctgcccggacctccccctgcacgtcccggtcccgccgcccgcccccgctgcggccacctcgcccgtctcccgcccctccaagccacagatcatctttggattcttccccagaagcttcaagtagggatatgtcctcagcaccaactactcctccatcagtggataaagtagacggattttctcggaagtccgtcagaaaagccagacagaagaggtcgcaaagttcctcacagtttaggtctcaaggcaagcctattgagttaacacctctgccgctgctaaaagacgttccatcctcagagcagcctgaactgttcctaaagaaacttcagcagtgctgtgtcatttttgacttcatggacacgctatctgatcttaaaatgaaagaatacaagcgctccactcttaatgaactggtggactacattacaataagcagaggctgtttgacagagcagacttaccctgaagtagttagaatggtatcttgcaatatattcagaactctccctcctagtgacagcaatgaatttgatccagaagaagatgaacctacccttgaggcatcgtggccacacttacagcttgtatatgaatttttcatacgatttttggaaagccaagaattccaacccagcattgccaaaaaatatatagatcagaaatttgtattacagcttctggagctatttgacagcgaagaccctcgggaacgggactacttaaaaacagtcttacacagaatttatggcaagtttcttggtcttagagcatttatccgaaaacagattaacaatatttttctaaggtttgtttatgaaacagaacacttcaatggtgtagctgaactgctggaaatattaggaagtattatcaatggctttgctttacctcttaaggcagaacacaaacagtttctggtgaaagtattgatccctttacacactgtcaggagcttatcactcttccatgcacagctggcatattgtatagtacagtttctggagaaagatccttcactcacagaaccagttattagggggttaatgaaattttggcctaaaacatgtagtcaaaaagaggtcatgttccttggggaactggaagaaatattggatgtgattgaaccttcacaatttgttaaaatccaagaacctttgtttaaacaaatcgccaagtgtgtatctagcccccattttcaggtggcagaaagagcactctattattggaataatgaatacatcatgagtttgatagaagaaaactctaacgtcatccttcccatcatgttttccagcctttataggatttcaaaagaacattggaatccggctattgtggcgttggtgtacaatgtgttgaaggcatttatggaaatgaacagcaccatgtttgacgagctgacagccacatacaagtcagatcgtcagcgtgagaaaaagaaagaaaaggagcgtgaagaattgtggaaaaaattggaggatctggagttaaagagaggtcttagacgtgatggaataattccaacttaacaaaaacaatgacaacaacattactaacctgtggagtcacacgtttatgtagtagaagatggagcaacagttttctgtattgtgcaactttacagtagatttcacctttgtttcattattacagcagcactgtatatacctgtctctaagtaaaggaaaaaacaaaataaggacttcaatccaaagtttggacagtagatggacttctcagaactttgcaaacataatcattgttctcaccctcttttaaaaaaaaaaatcggtcttcaaagatctgttgatgaaattgctatgttaaaattccattatcgggagttccttatttatcactagcagagagtatgatacaattttcaaatgtgaacaatcttaaatttagcttgtctttctgctaagctgttaaatgtatttatagtaaaggaagaaaaaaagactgtcatttccttataagtttgtgtaacatcctcctctggataacttgactgtaatttaacatctttttcttttgcacatcttcctgagttgaatgtccacgtggaatggggtcatgaattataaaagtccctgataaaagttttgtttactggggtgaacatctttccagtaaccaggtagtcctggtactcctttagttttaaaattaggagttaagagagaagaggtgataaacatagtagggaagggaatatcggattcatgcatcagtttatggtgaatccaaatcaatgtcttgaatcctttgaaaacaggcactgggacatcacaggcttcagtacctgaccagtattagttgcatatatcattgaacacacataccagagatgttttagaaatgtgagaaaaacatccttttggaccatttgaaataagaaagacaaacactaaacaatacaaccatgaaattgatcaccgggattgcaaatctaattgggaaaagagttgagcaaacagcttggactgtttggagttgttgccttactttttaatatgtatttataaagtattccagcaaaagaggatgtagcctctgggaaaaaacaaacatgttacagtgttttttgtagattctcgttctatatctcatcacagcgccagccctgtttttagccggaaaggattcaggataaacattattatgcattctgaattggatgcatattcctaactactgtatttgttaccaaaagtggttctacaaatgctactgaaaaaaatctggaaattcctaatgtcctgagtattaataataaagtttaaaaatgcttttatatcaaaggtgcatcgtgaccaaattgtttaagaaaaaaaaacaaaaaaaacaaaatctagggctgtattttatatatatatatatatatatatatatatatat

SEQ ID NO: 68 - DNA, 3192 bp, Homo sapiens
attcgctgcggagccggaggaggaggggagaggcctggaggacaccaacatgaacaagttgaaatcatcgcagaaggataaagttcgtcagtttatgatcttcacacaatctagtgaaaaaacagcagtaagttgtctttctcaaaatgactggaagttagatgttgcaacagataattttttccaaaatcctgaactttatatacgagagagtgtaaaaggatcattggacaggaagaagttagaacagctgtacaatagatacaaagaccctcaagatgagaataaaattggaatagatggcatacagcagttctgtgatgacctggcactcgatccagccagcattagtgtgttgattattgcgtggaagttcagagcagcaacacagtgcgagttctccaaacaggagttcatggatggcatgacagaattaggatgtgacagcatagaaaaactaaaggcccagatacccaagatggaacaagaattgaaagaaccaggacgatttaaggatttttaccagtttacttttaattttgcaaagaatccaggacaaaaaggattagatctagaaatggccattgcctactggaacttagtgcttaatggaagatttaaattcttagacttatggaataaatttttgttggaacatcataaacgatcaataccaaaagacacttggaatcttcttttagacttcagtacgatgattgcagatgacatgtctaattatgatgaagaaggagcatggcctgttcttattgatgactttgtggaatttgcacgccctcaaattgctgggacaaaaagtacaacagtgtagcactaaaggaaccttctagaatgtacatagtctgtacaataaatacaacagaaaattgcacagtcaatttctgctggctggactgaactgaagatcaatcctcacaattcagactgagggttgagacaaaactttaaggatacatcttggaccatatcgtatttcattcttctaatggtggtttgggcttgtcttctagtctgggccgctctaaacatttataattccaacattgtggatttcatcttatatctgtggaccatcctagtttattctcccataagtcttagaagctttatggtgattattttgaggttttcattctcgcataaagcacaatgctgtcttcatcagaaaacagttggcataagaattaaacatatgaacatcacaaaacaatttataaaaacttcttaaatatacgctttgggctagttgcaaagactatgctaatagcacttccagtgagagtgatatatttaagtgtactggatctggaatggtgttttggtttggggggaattttttttttttcctggcaaatcacatgtgttgttgatgtgagtatctgatgaaaaaacaatgtcagaataaccgacatgaaaattttttaggataacttggtgcctacctgaaaaatgtattgtgttttagactcttgatttcaaaaggttccacagaactagtctgcgcttaccttacccatgtttatatatagctgtcctacagggagcttttatttagaaaatgtctgcataatgttagattcttctcctgtctacattatgcactacataattggacttcattatgcttttgaaatgcttatctgcctgtcacataagttaaactatttaatttgttttgaatgttttggattgctacacaatacaatattctaaatttaggcatgagggtttttttgttttgtttttactttttttttgtcatcgcactatggaacacaaatggaattctcttaatttataagaagatagttgcagttaaattttgaaaatggttgtaatgagccatgaagttcaatctttataatataggtactgctctttcagacaaatagtccattttcgatgacttattattttgttgaaattgctttaactgctaatcactgtggttgccaaatatttacttcaggagcaaagattttcaaacaagcatacacgatgcaaaataccaatctggcttctagtctctttactgttttcgtttcactcagattagctcagttttctcatcaaagcagaatgctatcttgtatgtatttttttcattacaagccccatgagctgcttttatgctgaaaatggtcatttccctgttcacttactgacatgtgaagaagggtttcttgctttcttaaacatttccgtaaggcaggctagaaatgtaatacttcaaatgtttgatgattatggtcttttgataggaatagattctgcttgggatatatatccaggcactctctaaggtctagggttgatattaacaaaggaatgtacttagaatagcagtacattttatgcaaatatggaaattattttaagaaacaatgacatatcaaaactgctttttacatgattttgaaatagactagaaagctttccctatagacatattaatattccaatcataactttaattcaagaatgcagttttaccaaaagaaaaatttgaaaatttctattcaggctactggaattggttattaaaagaaaaaggaaaaagaagaatcttgctgctttcagtatttcctgatttttttgtaaatataaagaggaacttcaattatgaaaaatttttaaaagatatatatatctatatatctatatatatgtactgttttgtttcctgtcttgaagattttgagttatggttattggtttcagattgattaattcacatatgctgtgttttgaaatgagatcccattagcttttttttttttttttttttttcaatataaagtgttttctttaaaagtcatattggttcgtggcctagtgccttggattttacatatttttctttttaaatgcaaaaccttttcaacaaaatagtgtttgtcatcaggttggtactaaacatttataattactgtgtaattataaacaaaaatacataaagctttgaatataattatgtagcataaaagttaaggttgttcactatgatggcatcttagaattaaacaaaacttttactagggctgaaaagagaagactgatttaatgtggtgtgattattctgaagataaatgtctggctacagggaatattttgtactaaaaaatgattacacaaaaaaaaaaaaaaaaaaaaaaaaaaaaaaaaaaaaaaaaa

SEQ ID NO: 69 - DNA, 3782 bp, Homo sapiens
ttctgcccttcccccgcttaggggggcgggggtaggggaaaggaaaataatacaatttcaggggaagtcgccttcaggtctgctgcttttttattttttttttttaattaaaaaaaaaaaggacatagaaaacatcagtcttgaacttctcttcaagaacccgggctgcaaaggaaatctcctttgtttttgttatttatgtgctgtcaagttttgaagtggtgatctttagacagtgactgagtatggatcatttgaacgaggcaactcaggggaaagaacattcagaaatgtctaacaatgtgagtgatccgaagggtccaccagccaagattgcccgcctggagcagaacgggagcccgctaggaagaggaaggcttgggagtacaggtgcaaaaatgcagggagtgcctttaaaacactcgggccatctgatgaaaaccaaccttaggaaaggaaccatgctgccagttttctgtgtggtggaacattatgaaaacgccattgaatatgattgcaaggaggagcatgcagaatttgtgctggtgagaaaggatatgcttttcaaccagctgatcgaaatggcattgctgtctctaggttattcacatagctctgctgcccaggccaaagggctaatccaggttggaaagtggaatccagttccactgtcttacgtgacagatgcccctgatgctacagtagcagatatgcttcaagatgtgtatcatgtggtcacattgaaaattcagttacacagttgccccaaactagaagacttgcctcccgaacaatggtcgcacaccacagtgaggaatgctctgaaggacttactgaaagatatgaatcagagttcattggccaaggagtgccccctttcacagagtatgatttcttccattgtgaacagtacttactatgcaaatgtctcagcagcaaaatgtcaagaatttggaaggtggtacaaacatttcaagaagacaaaagatatgatggttgaaatggatagtctttctgagctatcccagcaaggcgccaatcatgtcaattttggccagcaaccagttccagggaacacagccgagcagcctccatcccctgcgcagctctcccatggcagccagccctctgtccggacacctcttccaaacctgcaccctgggctcgtatcaacacctatcagtcctcaattggtcaaccagcagctggtgatggctcagctgctgaaccagcagtatgcagtgaatagacttttagcccagcagtccttaaaccaacaatacttgaaccaccctccccctgtcagtagatctatgaataagcctttggagcaacaggtttcgaccaacacagaggtgtcttccgaaatctaccagtgggtacgcgatgaactgaaacgagcaggaatctcccaggcggtatttgcacgtgtggcttttaacagaactcagggcttgctttcagaaatcctccgaaaggaagaggaccccaagactgcatcccagtctttgctggtaaaccttcgggctatgcagaatttcttgcagttaccggaagctgaaagagaccgaatataccaggacgaaagggaaaggagcttgaatgctgcctcggccatgggtcctgcccccctcatcagcacaccacccagccgtcctccccaggtgaaaacagctactattgccactgaaaggaatgggaaaccagagaacaataccatgaacattaatgcttccatttatgatgagattcagcaggaaatgaagcgtgctaaagtgtctcaagcactgtttgcaaaggttgcagcaaccaaaagccagggatggttgtgcgagctgttacgctggaaagaagatccttctccagaaaacagaaccctgtgggagaacctctccatgatccgaaggttcctcagtcttcctcagccagaacgtgatgccatttatgaacaggagagcaacgcggtgcatcaccatggcgacaggccgccccacattatccatgttccagcagagcagattcagcaacagcagcagcaacagcaacagcagcagcagcagcagcaggcaccgccgcctccacagccacagcagcagccacagacaggccctcggctccccccacggcaacccacggtggcctctccagcagagtcagatgaggaaaaccgacagaagacccggccacgaacaaaaatttcagtggaagccttgggaatcctccagagtttcatacaagacgtgggcctgtaccctgacgaagaggccatccagactctgtctgcccagctcgaccttcccaagtacaccatcatcaagttctttcagaaccagcggtactatctcaagcaccacggcaaactgaaggacaattccggtttagaggtcgatgtggcagaatataaagaagaggagctgctgaaggatttggaagagagtgtccaagataaaaatactaacacccttttttcagtgaaactagaagaagagctgtcagtggaaggaaacacagacattaatactgatttgaaagactgagataaaagtatttgtttcgttcaacagtgccactggtatttactaacaaaatgaaaagtccaccttgtcttctctcagaaaacctttgttgttcattgtttggccaatgaatcttcaaaaacttgcacaaacagaaaagttggaaaaggataatacagactgcactaaatgttttcctctgttttacaaactgcttggcagccccaggtgaagcatcaaggattgtttggtattaaaatttgtgttcacgggatgcaccaaagtgtgtaccccgtaagcatgaaaccagtgttttttgttttttttttagttcttattccggagcctcaaacaagcattataccttctgtgattatgatttcctctcctataattatttctgtagcactccacactgatctttggaaacttgccccttatttaaaaaaaaaaaagaaaaaaaagagtttgttactctattgtatgttacaaaagaactatagactgtggaatgcagtttaaagatgacatatgccaacaaatgccttgtattatatggcactgccgtaattcaaatttgtttttattttggaaataaaagttcactgtacttttttttcattctcattgttacatgattttttaaaaaaaggaaaagaaaatgtgaaacacaatttagtcctcattatttatttgtagatcctgcagcatcatgttgtaattaattttttggaagtttccgttaaatgtaatattgcttctcttgttaccatactgattcttttctatttataaatgtattttgatgggcagtaaaacaaagtgtcttaaaagttttaaatagagaaaatgtgctttacacagttgcctataaaaagtgctctatgttatccaagcaattcatactataagcttcactcttattgttgtatgcaatttttactatcatgcaaataagcttaggtaaataaaactaatagatcaccttagaaaattatgcaattaatgtgaaaataattgatgtttgcaatgtgtcttcctttggtttacaatcaattttaaagctacatctgtataaaatttctgtataaaggtgtatttcttttttatgagtttatggctatgaaaacagctattttgttacagctggctgtttttataagtgtatcacaattttctttatgcagaaatgttctgactaggagtggttattgactgtaactacacaattaaaattgtttgtatcgtaaaaaaaaaaaaaaaaaa

SEQ ID NO: 70 - DNA, 1621 bp, Homo sapiens
gcggcaggtctctgcgcagcccagcccgccggtccacgccgcgcaccgctccgagggccagcgccacccgctccgcagccggcaccatgcgcgagatcgtgcacatccaggcgggccagtgcggcaaccagatcggcgccaagttttgggaggtcatcagcgatgagcatgggatcgaccccacaggcagttaccatggagacagtgacttgcagctggagagaatcaacgtgtactacaatgaggctgctggtaacaaatatgtacctcgggccatcctggtggatctggagcctggcaccatggactctgtcaggtctggacccttcggccagatcttcagaccagacaacttcgtgttcggccagagtggagccgggaataactgggccaagggccactacacagagggagccgagctggtcgactcggtcctggatgtggtgaggaaggagtcagagagctgtgactgtctccagggcttccagctgacccactctctggggggcggcacggggtccgggatgggcaccctgctcatcagcaagatccgggaagagtacccagaccgcatcatgaacaccttcagcgtcatgccctcacccaaggtgtcagacacggtggtggagccctacaacgccaccctctctgtccaccagctggtggaaaacacagatgaaacctactccattgataacgaggccctgtatgacatctgcttccgcaccctgaagctgaccacccccacctacggggacctcaaccacctggtgtcggccaccatgagcggggtcaccacctgcctgcgcttcccgggccagctgaacgcagacctgcgcaagctggcggtgaacatggtgcccttccctcgcctgcacttcttcatgcccggcttcgcgcccctgaccagccggggcagccagcagtaccgggcgctcacggtgcccgagctcacccagcagatgttcgactccaagaacatgatggccgcctgcgacccgcgccacggccgctacctgacggtggctgccatcttccggggccgcatgtccatgaaggaggtggacgagcagatgctcaacgtgcagaacaagaacagcagctacttcgtggagtggatccccaacaacgtgaagacggccgtgtgcgacatcccgccccgcggcctgaagatgtcggccaccttcatcggcaacagcacggccatccaggagctgttcaagcgcatctccgagcagttcacggccatgttccggcgcaaggccttcctgcactggtacacgggcgagggcatggacgagatggagttcaccgaggccgagagcaacatgaacgacctggtgtccgagtaccagcagtaccaggacgccacggccgacgaacaaggggagttcgaggaggaggagggcgaggacgaggcttaaaaacttctcagatcaatcgtgcatccttagtgaacttctgttgtcctcaagcatggtctttctacttgtaaactatggtgctcagttttgcctctgttagaaattcacactgttgatgtaatgatgtggaactcctctaaaaattacagtattgtctgtgaaggtatctatactaataaaaaagcatgtgtagaaaa

SEQ ID NO: 71 - DNA, 2529 bp, Homo sapiens
cggagttgtcgtgtgttctggattcattccggcaccaccatgtcgaaggtttcctttaagatcacgctgacgtcggacccacggctgccgtacaaagtactcagtgttcctgaaagtacacctttcacagcagtcttaaagtttgcagcagaagaatttaaagttcctgctgcaacaagtgcaattattaccaatgatggaataggaataaatcctgcacagactgctggaaatgtttttctaaaacatggttcagaactgcggattattcctagagatcgtgttggaagttgttaatatctgctacttggaacatacgattgcctttcagaataaatattggtattttttgttgttgtaaaattgaaatcaggcatttaacatactatgaaaacaccaggagtcaatgattaatgaaaggtgactcatctgtccctttttgttgtccatactcttcctatgaagagggaatgcgtatgaattaaggctactactgtcacagaagatcatagtctttgatgctacctcacaacacaaacaggtagttcgttgggggcaaatgaattagccaactgttaactggaagcttttgataatttttttttttagaacaatttggaacattaaaatttactgaatcgtatatattcatctgagataaaaatataaaaagaattatggaccctggatggcaatttgcttgatagcatctgatttgcagactcataatttgatttttaattaaatatataggttatgatgaagtgaatagacatatcagtgaacagttaactatattaaatttttatcatttactttttttaagattcagacctcagttatataaatttcagtttaatatcaaccaaaaaattaaaattttaatctaacccttatgtgtataaattggtgtcccataccagcttttaatggtggacctatagaatccagtacttttaatggtgggaatttacagtagaagcatcctttgctgagttatacattcctttatcaatctcttttgatacaacatttaaaacaagtagcttcaagaaaccactggtgttttgaggatagtatttctaaatagcattcaggaacagagtattattgcacagatctgaagatcaaaaaaaagctcaaggaaatacagatcggaagtgctgatgagttatatttattgaaaacccaacttttaaggaagtgctaagatcagtcacccatgtgaataagaagccaggaaaggaaagatggggaagcccagatcaccaggcttctattaaggaggaaagcaacagaggaaacagtgaaggggaacagaagggggtagcaaagtgttacagaaaagcggactggatagacaaaactgcagaaggtgtatgttggggagaactgaaagggaaaacaaaatacttgacatagtcttaagtagaagaaggcagttagagaaaacaaagtatctactggccttgtcaacatacagacttcaaaataccccttatgagaatccaaagaatgatgtgtgtaagggaagattttatttgcccttccggaagaaatcagtatctatgcaaatcttgaaagacgaaatcaaagcccattaatgattcagaatcagtgcttgacctcctgtattctgaatggtgaactctggaagcagggattgtgtctggctctttttagagctggaagtgtagtggctttcattaaatacttgctgtaaagtctttctaagaccaattattatcttagcatgtttcagtatcttctctatcataggccctaagttcattgggggaaaaaaaataagaagattcaacagaatcagcatttgaagtgtaccattggtagttgtttatgaaattaccagatattcataaatgtgacaaatgaacagcaggattatgaattatcaaaggaaaaagtatttgctgaggtgaaaaaatctgatgtttgaggaagtttttatttttatttatttgttttgtttttttttttttttgaggcagactctctgtcgccaggcttctcctgcctcagcctcacgagtagctgggactacaggcatgcaccaccacgcccagctaatttttgtatttttagcagagacagggaggaagtttttatttttataaacaaaatctgatgttcagaggccccgtttcttacaataaatgttgagtcttagttaagcaggaatttatgaacacccatttcctgactttttgctttaatttagatttttctccatcctgtttctagcacaaaaatttgcctgctgtgttacaaaaataaatttatgttgtcctgtgccataaagtgatatatttaatatttttattctttggttttgaacattgtaagttcctaaaaacattttattaaacaagtagacattttgttattaaaaaaatgtgatctgtaatttctttgtgcagaatgatttgaagtattgtattcagtttacatgcattattggtttataattaatatctaatgaaaatacatgttgttatattgtaaaaaaaa

SEQ ID NO: 72 - DNA, 5184 bp, Homo sapiens
aaaaccctgcaggagactgcgagccctgcagaactgctagctgcgggggagagggcaggggtcgggcgcctgtggcggagccgggctggggccagggcagggaggctgacaagcggcgggagaagccggcggagggcgggatcgcgcctcctgacatgttgggggtatccctggccgggccgggccggggctaagagcggcgctgcgggccggggtcggggtcgggtcgcggtccgcccccgctgtccctccgtcctgccctgtcgaggacgtgcgttccgcactcggccgcctccagagggagcgagggaagcggctagaggatcggggagaaggagcattcgccggaggctggaggaggctgacccgcgtccccgcccagcctgctcctatgcggtacttgaaggatggcgaagaggtcgcgcagtgaggatgaggatgatgaccttcagtatgccgatcatgattatgaagtaccacaacaaaaaggactgaagaaactctggaacagagtaaaatggacaagggacgaggatgataaattaaagaagttggttgaacaacatggaactgatgattggactctaattgctagtcatcttcaaaatcgctctgattttcagtgccagcatcgatggcagaaagttttaaatcctgaattgataaagggtccttggactaaagaagaagatcagagggttattgaattagttcagaaatatgggccaaaaagatggtctttaattgcaaaacatttaaaaggaagaataggcaagcagtgtagagaaagatggcataatcatctgaatcctgaggtaaagaaatcttcctggacagaagaggaggacaggatcatctatgaagcacataagcggttgggaaatcgttgggcagaaattgccaaactacttccaggaaggactgataattctatcaaaaatcattggaattctactatgcgaagaaaagtggaacaggagggctatttacaagatggaataaaatcagaacgatcttcatctaaacttcaacacaaaccttgtgcagctatggatcatatgcaaacccagaatcagttttacatacctgttcagatccctgggtatcagtatgtgtcacctgaaggcaattgtatagaacatgttcagcctacttctgcctttattcagcaacccttcattgatgaagatcctgataaggaaaagaaaataaaggaacttgagatgcttcttatgtcagctgagaatgaagttagaagaaagcgaattccatcacagcctggaagtttttctagctggtctggtagtttcctcatggatgataacatgtctaatactctaaatagccttgacgagcacactagtgagttttacagtatggatgaaaatcagcctgtgtctgctcagcagaattcacccacaaagttcctggccgtggaggcaaacgctgtgttatcctctttgcagaccatcccagaatttgcagagactctagaacttattgaatctgatcctgtagcatggagtgacgttaccagttttgatatttctgatgctgctgcttctcctatcaaatccaccccagttaaattaatgagaattcagcacaatgaaggagccatggaatgccaatttaacgtcagtcttgtacttgaagggaaaaaaaacacttgtaatggtggcaacagtgaagctgttcctttaacatccccaaatatagccaagtttagcactccaccagccatcctcagaaagaagagaaaaatgcgagtgggtcattccccaggcagcgaacttagggatggctcattgaacgatggtggtaatatggcgctaaaacatacaccactgaaaacactaccattttctccttcacagtttttcaacacatgtcctggtaatgaacaacttaatatagaaaatccttcatttacatcaacccctatttgtgggcagaaagctctcattacaactcctcttcataaggaaacaactcccaaagatcaaaaggaaaatgtagggtttagaacacctactattagaagatctatactgggtaccacaccaagaactcctactccttttaagaatgcgcttgctgctcaggagaaaaaatatggacctcttaaaattgtgtcccagccacttgctttcttggaagaagatattcgggaagttttaaaagaagaaactggaacagacctattcctcaaagaggaagatgaacctgcttacaaaagctgcaaacaagagaataccgcttctgggaagaaagtcagaaaatcactagtcttagataattgggaaaaagaagaatcaggcactcaactgttgactgaagacatttcagacatgcagtcagaaaatagatttactacatccttattaatgataccattattggaaatacatgacaataggtgcaacttgattcctgaaaaacaagatataaattcaaccaacaaaacatatacacttactaaaaagaaaccaaaccctaacacttccaaagttgtcaaattggaaaagaatcttcagtcaaattgtgaatgggaaacagtggtttatgggaagacagaagaccaacttattatgactgaacaagcaagaagatatctgagtacttacacagctaccagtagtacttcaagagctctcatactgtaattgttattaaaattgatgaaatgccccactcccttactgcagtctctactaaattaggttgcagtgaaatttttctcaattagttgtttttaaagttgtaagatagcccttttaatacagcatcttttttctattctatatagtaggcagaaagctagtaagtcacttaaggggtagatagtttcatagtttattttttaagagatgagatttttaaaaattgtttttaaagaacaagatgggaaaataatagaatgttcatggatttctaaaagtaaattctcatatattttcttcacaagatatatgttgctactctcttgatgctgcagttttgttatagataggtgtatgagtatatatgatttctgaaattagtctatgtatggaaagcacacatgattttatgaagtacttttgcccatgtgctgatttacttaggctaccatttacaaagaaacacattgaaaaggaatttaaaggaaggatagaaagttgcactactaattttttgttttttttttcagaagcagtaaaattaactacagtgttaaatgtatttatttgagcatagtactgaaaacaaaaagcattcaaaaaagagttttttctttattagtaaatagtattttcttaatctcagaggagctgagagttttgttgaatgtattgtacagtatgtaggagcaggagaactttgtaaattggaaagaagtctgtttttataatttatttttatttttaaagcttaaatgtagatatttatacgtatacagggtgcctagaagccaatgttgtttcctgttattacagctaacacagtaaagaataattttgactttaagtatgaaacagtagtaagttatagctgcaaagaatacaatatctatactgtatgtcacatctacctaaatgttgcactatgccctttaaatcatgctggttataaagtagttctaaaaatgtactaaataataatttaatattttctttttaaattatatcgggggtggtcatatacattaatctggtgatttgtatatgtgtttgaaatttttgcattttgtttaaaaaataatatggtaccttggtccctaaaaacagtctgcacttagaagtttatatttactcagtgtttcagaagtggagaacattatcttttatttataaaaatattttgtccttttttaaatgttttgtgtttctctacaggttacaacagttgcttcagttgcctgttttaggtgtttgcacttattttatttcttcttgaaagaatttttatttgcttttgtggtagagattatatgtaattttttttcagtcatataatggtgtgctgtcaacttaaacactgacaggtaaatagaattgtacactgtagtttgaattatttataattgacacactctctccctctccactcctgaagtatgctgctatagaaaatagcagaatcggcttgctgctacgagagaaggaaagagcgaccaccacttgcactgtgtgaaaagataaaaaacaaatgatggcaagttctcaagttaactaaatggaatcaaccattaccaggcaaattcttgcaaataccaaaatactactatgccttataaaacaaaatgaaagcaggttaagattttctgctctgtttgtatgttaatagaaatggaaatactaagtattttaatgcttagctcttgaacagtagacctaaaagggttttaagctatttaaatctacttgctagtttttgcatattttatatatatatatatttatatatatatatagtgagaagtgaagaaaatgtatggtactaagattatgccttattgataaatagataaaccaatttgaatcctcttagcatgtttaagtatgttgattgctttctaattaatgaacttctcacagaaatttcacttagtgaaaccaatgattgtagcaaactcatactggatcatttcagttaccttgaactaatagcacataatggttttttgttgttgttgtttttaatgtagcccttacctggatatacatagtctgcaatcaccaaagtataatatcttgtaaggctatattttttaaagcatattttttcttgagcattaaattatcctaaatggtaatatattgtggataagtctgggcttattggacataatacatatttgggttggtactggttgaatccttcagttaactgctttgttgctttttgcaagattttttatcttaaacatgtcaggcatcttaagtcacctttatactgttttgttcctctgagtttctttcagtatgttatacaaatgccagacataacatgtagcagccatacttgcatggaaactgactacacatacataatactgcattttattgtaaggttttcacattaatacagcaattaccctgactaaattgagttttgtgatatatggaaaacttcattgtaagagaatcttgcatacaatgttgacatattaacatccaaaataaagcatctgtgtacaag

SEQ ID NO: 73 - DNA, 7149 bp, Homo sapiens
atgtctggcggcgccgcagagaagcagagcagcactcccggttccctgttcctctcgccgccggctcctgcccccaagaatggctccagctccgattcctccgtgggggagaaactgggagccgcggccgccgacgctgtgaccggcaggaccgaggagtacaggcgccgccgccacactatggacaaggacagccgtggggcggccgcgaccactaccaccactgagcaccgcttcttccgccggagcgtcatctgcgactccaatgccactgcgctggagcttcccggccttcctctttccctgccccagcccagcatccccgcggctgtcccgcagagtgctccaccggagccccaccgggaagagaccgtgaccgccaccgccacttcccaggtagcccagcagcctccagccgctgccgcccctggggaacaggccgtcgcgggccctgccccctcgactgtccccagcagtaccagcaaagaccgcccagtgtcccagcctagccttgtggggagcaaagaggagccgccgccggcgagaagtggcagcggcggcggcagcgccaaggagccacaggaggaacggagccagcagcaggatgatatcgaagagctggagaccaaggccgtgggaatgtctaacgatggccgctttctcaagtttgacatcgaaatcggcagaggctcctttaagacggtctacaaaggtctggacactgaaaccaccgtggaagtcgcctggtgtgaactgcaggatcgaaaattaacaaagtctgagaggcagagatttaaagaagaagctgaaatgttaaaaggtcttcagcatcccaatattgttagattttatgattcctgggaatccacagtaaaaggaaagaagtgcattgttttggtgactgaacttatgacgtctggaacacttaaaacgtatctgaaaaggtttaaagtgatgaagatcaaagttctaagaagctggtgccgtcagatccttaaaggtcttcagtttcttcatactcgaactccacctatcattcaccgcgatcttaaatgtgacaacatctttatcaccggccctactggctcagtcaagattggagacctcggtctggcaaccctgaagcgggcttcttttgccaagagtgtgataggtaccccagagttcatggcccctgagatgtatgaggagaaatatgatgaatccgttgacgtttatgcctttgggatgtgcatgcttgagatggctacatctgaatatccttactcggagtgccaaaatgctgcgcagatctaccgtcgcgtgaccagtggggtgaagccagccagttttgacaaagtagcaattcctgaagtgaaggaaattattgaaggatgcatacgacaaaacaaagatgaaagatattccatcaaagaccttttgaaccatgccttcttccaagaggaaacaggagtacgggtagaattagcagaggaagatgatggagaaaaaatagccataaaattatggctacgtattgaagatattaagaaattaaagggaaaatacaaagataatgaagctattgagttttcttttgatttagagagagatgtcccagaagatgttgcacaagaaatggtagagtctgggtatgtctgtgaaggtgatcacaagaccatggctaaagctatcaaagacagagtatcattaattaagaggaaacgagagcagcggcagttggtacgggaggagcaagaaaaaaaaaagcaggaagagagcagtctcaaacagcaggtagaacaatccagtgcttcccagacaggaatcaagcagctcccttctgctagcaccggcatacctactgcttctaccacttcagcttcagtttctacacaagtagaacctgaagaacctgaggcagatcaacatcaacaactacagtaccagcaacccagtatatctgtgttatctgatgggacggttgacagtggtcagggatcctctgtcttcacagaatctcgagtgagcagccaacagacagtttcatatggttcccaacatgaacaggcacattctacaggcacagtcccagggcatataccttctactgtccaagcacagtctcagccccatggggtatatccaccctcaagtgtggcacaggggcagagccagggtcagccatcctcaagtagcttaacaggggtttcatcttcccaacccatacaacatcctcagcagcagcagggaatacagcagacagcccctcctcaacagacagtgcagtattcactttcacagacatcaacctccagtgaggccactactgcacagccagtgagtcagcctcaagctccacaagtcttgcctcaagtatcagctggaaaacagcttccagtttcccagccagtaccaactatccaaggcgaacctcagatcccagttgcgacacaaccctcggttgttccagtccactctggtgctcatttccttccagtgggacagccgctccctactcccttgctccctcagtaccctgtctctcagattcccatatcaactcctcatgtgtctacggctcagacaggtttctcatcccttcccatcacaatggcagctggcattactcagcctctgctcacgttggcttcatctgctacaacagctgcgatcccgggggtatcaactgtggttcctagtcagcttccaacccttctgcagcctgtgactcagctgccaagtcaggttcacccacagctcctacaaccagcagttcagtccatgggaataccagctaaccttggacaagctgctgaggttccactttcctctggagatgttctgtaccagggcttcccacctcgactgccaccacagtacccaggagattcaaatattgctccctcttccaacgtggcttctgtttgcatccattctacagtcctatcccctcccatgccgacagaagtactggctacacctgggtactttcccacagtggtgcagccttatgtggaatcaaatcttttagttcctatgggtggtgtaggaggacaggttcaagtgtcccagccaggagggagtttagcacaagcccccactacatcctcccagcaagcagttttggagagtactcagggagtctctcaggttgctcctgcagagccagttgcagtagcacagccccaagctacccagccgaccactttggcttcctctgtagacagtgcacattcagatgttgcttcaggtatgagtgatggcaatgagaacgtcccatcttccagtggaaggcatgaaggaagaactacaaaacggcattaccgaaaatctgtaaggagtcgctctcgacatgaaaaaacttcacgcccaaaattaagaattttgaatgtttcaaataaaggagaccgagtagtagaatgtcaattagagactcataataggaaaatggttacattcaaatttgacctagatggtgacaaccccgaggagatagcaacaattatggtgaacaatgactttattctagcaatagagagagagtcgtttgtggatcaagtgcgagaaattattgaaaaagctgatgaaatgctcagtgaggatgtcagtgtggaaccagagggtgatcagggattggagagtctacaaggaaaggatgactatggcttttcaggttctcagaaattggaaggagagttcaaacaaccaattcctgcgtcttccatgccacagcaaataggcattcctaccagttctttaactcaagttgttcattctgcgggaaggcggtttatagtgagtcctgtgccagaaagccgattacgagaatcaaaagttttccccagtgaaataacagatacagttgctgcctctacagctcagagccctggaatgaacttgtctcactctgcatcatcccttagtctacaacaggccttttctgaacttagacgtgcccaaatgacagaaggacccaacacagcacctccaaactttagtcatacaggaccaacatttccagtagtacctcctttcttaagtagcattgctggagtcccaaccacagcagcagccacagcaccagtccctgcaacaagcagccctcctaatgacatttccacatcagtaattcagtctgaggttacagtgcccactgaagaggggattgctggagttgccaccagcacaggtgtggtaacttcaggtggtctccccataccacctgtgtctgaatcaccagtactttccagcgtagtttcaagtatcacaatacctgcagttgtctcaatatctactacatccccgtcacttcaagtccccacatccacatctgagatcgttgtttctagtacagcactgtatccttcagtaacagtttcagcaacttcagcctctgcagggggcagtactgctaccccaggtcctaagcctccagctgtagtatctcagcaggcagcaggcagcactactgtgggagccacattaacatcagtttctaccaccacttcattcccaagcacagcttcacagctgtccattcagcttagcagcagtacttctactcctactttagctgaaaccgtggtagttagcgcacactcactagataagacatctcatagcagtacaactggattggctttctccctctctgcaccatcttcctcttcctctcctggagcaggagtgtctagttatatttctcagcctggtgggctgcatcctttggtcattccatcagtgatagcttctactcctattcttccccaagcagcaggacctacttctacacctttattaccccaagtacctagtatcccacccttggtacagcctgttgccaatgtgcctgctgtacagcagacactaattcatagtcagcctcaaccagctttgcttcccaaccagccccatactcattgtcctgaagtagattctgatacacaacccaaagctcctggaattgatgacataaagactctagaagaaaagctgcggtctctgttcagtgaacacagctcatctggagctcagcatgcctctgtctcactggagacctcactagtcatagagagcactgtcacaccaggcatcccaactactgctgttgcaccaagcaaactcctgacttctaccacaagtacttgcttaccaccaaccaatttaccactaggaacagttgctttgccagttacaccagtggtcacacctgggcaagtttctaccccagtcagcactactacatcaggagtgaaacctggaactgctccctccaagccacctctaactaaggctccggtgctgccagtgggtactgaacttccagcaggtactctacccagcgagcagctgccaccttttccaggaccttctctaacccagtcccagcaacctctagaggatcttgatgctcaattgagaagaacacttagtccagagattatcacagtgacttctgcggttggtcctgtgtccatggcggctccaacagcaatcacagaagcaggaacacagcctcagaagggtgtttctcaagtcaaagaaggccctgtcctagcaactagttcaggagctggtgtttttaagatgggacgatttcaggtttctgttgcagcagacggtgcccagaaagagggtaaaaataagtcagaagatgcaaagtctgttcattttgaatccagcacctcagagtcctcagtgctatcaagtagtagtccagagagtaccttggtgaaaccagagccgaatggcataaccatccctggtatctcttcagatgtgccagagagtgcccacaaaactactgcctcagaggcaaagtcagacactgggcagcctaccaaggttggacgttttcaggtgacaactacagcaaacaaagtgggtcgtttctctgtatcaaaaactgaggacaagatcactgacacaaagaaagaaggaccagtggcatctcctccttttatggatttggaacaagctgttcttcctgctgtgataccaaagaaagagaagcctgaactgtcagagccttcacatctaaatgggccgtcttctgacccggaggccgcttttttaagtagggatgtggatgatggttccggtagtccacactcgccccatcagctgagctcaaagagccttcctagccagaatctaagtcaaagccttagtaattcatttaactcctcttacatgagtagcgacaatgagtcagatatcgaagatgaagacttaaagttagagctgcgacgactacgagataaacatctcaaagagattcaggacctgcagagtcgccagaagcatgaaattgaatctttgtataccaaactgggcaaggtgccccctgctgttattattcccccagctgctcccctttcagggagaagacgacgacccactaaaagcaaaggcagcaaatctagtcgaagcagttccttggggaataaaagcccccagctttcaggtaacctgtctggtcagagtgcagcttcagtcttgcacccccagcagaccctccaccctcctggcaacatcccagagtccgggcagaatcagctgttacagccccttaagccatctccctccagtgacaacctctattcagccttcaccagtgatggtgccatttcagtaccaagcctttctgctccaggtcaaggaaccagcagcacaaacactgttggggcaacagtgaacagccaagccgcccaagctcagcctcctgccatgacgtccagcaggaagggcacattcacagatgacttgcacaagttggtagacaattgggcccgagatgccatgaatctctcaggcaggagaggaagcaaagggcacatgaattacgagggccctggaatggcaaggaagttctctgcacctgggcaactgtgcatctccatgacctcgaacctgggtggctctgcccccatctctgcagcatcagctacctctctaggtcacttcaccaagtctatgtgccccccacagcagtatggctttccagctaccccatttggcgctcaatggagtgggacgggtggcccagcaccacagccacttggccagttccaacctgtgggaactgcctccttgcagaatttcaacatcagcaatttgcagaaatccatcagcaaccccccaggctccaacctgcggaccacttag

SEQ ID NO: 74 - DNA, 4204 bp, Homo sapiens
ccggggctgagctgcggcggcgcctgacaatgccccctcgcgccccggcctcggcgcccgctcccggctccagcgcgcctgcacgtacgtagccttcacgtgtgtgtggatacggagtgcatgtgtggagacagaggaatatgctccaacaaatttcggatagaggcgccgaagacaggacgtggggaagctaaagaagtaaacaggtcatggcacgtttaacaaaaagacgacaggcggatacaaaagctatccagcatctttgggcagccattgagattatacggaaccagaagcagattgccaacattgaccgtattacaaagtatatgtctcgagtccacggtatgcaccctaaagagaccacccgtcagctgagcttagctgtgaaagatggtcttattgtcgaaactctaacagtgggctgcaaaggttcaaaagctggtattgaacaagaaggatattggttgccaggagatgagattgactgggaaacagaaaatcatgactggtattgttttgaatgccatttgcctggagaggtgttgatatgtgacctgtgttttcgtgtgtatcattccaagtgtttgtctgatgagttcaggcttagagacagcagtagtccctggcagtgcccagtttgcaggagcattaagaagaagaatacaaacaaacaggagatgggcacatacctcagattcattgtctcccgcatgaaggagagggctatagatcttaataaaaaggggaaggacaataaacacccgatgtacaggaggctggtgcactcagctgtggacgttcccaccattcaagagaaagtgaatgaagggaaataccgaagttatgaagagttcaaagctgatgcccaattgcttctccacaataccgtgattttctatggagcagacagtgagcaagctgacattgcgaggatgctatataaagacacatgtcatgagctggatgaactgcagctttgcaagaattgcttttacttgtcaaatgctcgtcctgacaactggttctgttatccttgtatacctaatcatgagctggtttgggctaaaatgaaaggttttgggttttggccagccaaagtcatgcagaaagaagacaatcaagtcgacgttcgcttctttggccaccaccaccagagggcctggattccttctgaaaacattcaagatatcacagtcaacattcatcggctgcacgtgaagcgcagtatgggttggaaaaaggcctgtgatgagctggagctgcatcagcgtttcctacgagaagggagattttggaaatctaagaatgaggaccgaggtgaggaagaggcagaatccagtatctcctccaccagtaatgagcagctaaaggtcactcaagaaccaagagcaaagaaaggacgacgtaatcaaagtgtggagcccaaaaaggaagaaccagagcctgaaacagaagcagtaagttctagccaggaaatacccacgatgcctcagcccatcgaaaaagtctccgtgtcaactcagacaaagaagttaagtgcctcttcaccaagaatgctgcatcggagcacccagaccacaaacgacggcgtgtgtcagagcatgtgccatgacaaatacaccaagatcttcaatgacttcaaagaccggatgaagtcggaccacaagcgggagacagagcgtgttgtccgagaagctctggagaagctgcgttctgaaatggaagaagaaaagagacaagctgtaaataaagctgtagccaacatgcagggtgagatggacagaaaatgtaagcaagtaaaggaaaagtgtaaggaagaatttgtagaagaaatcaagaagctggcaacacagcacaagcaactgatttctcagaccaagaagaagcagtggtgctacaactgtgaggaggaggccatgtaccactgctgctggaacacatcctactgctccatcaagtgccagcaggagcactggcacgcggagcacaagcgcacctgccgccggaaaagatgaagctggcccttcccggagtcaccccgatgattactcttttcagacacagcggtttttgtttccaagaagccaaaattgtttagaatttgcttcccattttgcaccagcctttaaacacttttcgtgaagaaattttgcacagtagtttaaatcttttgttaatgctcctccgaagtttttcagggggtaaaagtaacatcagtggagggtattattttaaataaattttaattgagaatttgttgcattttcagcaaattttaaaacatttttaggttttacagagattttaacctttaaacaacagatctttaaaaaacaggtgaatacaagtgagtttaacaaagaaacatttagaatagatctgaatgtaagaactacagaactgtttcagaaataaaacatactaccttgatgtgacatttttttcttaaccttgttgagctggttttgttcagcttaatttactgttcaaaggcattatctgttggtcacaccagtgggtatatgattgaatttagggaacagggttgacacagcagggctagtcctgcatattttttcttaaatatttcccaattgtgtttttcattatttcttttcaatatataacttttataacaaattattagctttgatcttgtagtttaaaattgcagggaactggggtaatcttttactgagctggatcttagagaaaatgaatatttaaattttaaagtttgcacatttcatctttgtcctaacatgagtgcttgtaacaaaataaacaacaaaaacaaagccaaaaactacctttatccatatgtgaaattatagatgaggcatacgaatttgtttaatgcttcccttcccttcccacatatcatctcactgcctattatctggtgtcacctcatgtatcgtaagttaatactaaaagaagagaaagcacttaagtttcacagaagccgttatgtttgtagtaatgggtcattgcctactaatgaactccatcactgtacacagaatgaagaataatgcatgttaattttcttgtattaaagatgccgtgatttgtaaaaagtctgtattttgcggaatgtctggattaagaagcattaccaataggaatggatcgatagttgaataatgattttttatacatagatatataaaatacagccaggaaaacttaaattacttttcttttaaaatatctcacaatttatgtggtatttttaaagactgatcttagaccaagtcaaattcccatttatcatttagttattttttgaggttagagaataatttgtacatatttatttagacctttgatatttattaaagcaattactcacaatggaagtgaaagaatcaggagaaaagccttttaaaaagtattctccaggtttgtcagggtcactctaaagataaaaatgtaactaagtcttctgtgaaatatcatccatctaatcttgatgctgttgcagatggtggtgacacaagttaattgacaaactactgccaaatggtgcacaatattttgtaaaaagtacccagtagccccatttcatacaatgtacctaaattatgcagtaacttggcatcatcgttccctccttgttgctgtgtaattagtcagtgttgccacagtgtgtggcgctgatggagatgtcagaaccgagaacacttaaccttctttgattgtttttcaagttttaagacttcgatccacccctatgagagcaagtaattgtggaaatatttttggtgtaaaatcattccagagtatgtaatatttaactgatagctgcatgaaagtgagattcgtgttactttggcttttctgtctctgttgacacggttgcacatttccaagttactacagcgtgaaaactgtgtgtttaaaaaaaaacaaaattaaaaaaagagattgtggcctggttttgtaaaagttttaggtaaaattacaattgattgttttaggaatcattattaaaaattttctgcaaatcataaagctatatcgaggtgttgagcttagccactatgcacattgtaattattcattgtggctgtccagttctatgatgcattctggcattttgtaagctgctctgactagcaatatatagattcatttaatgtgttaacattggttaataaatgtatttaaaaaaaactaaaaaaaaaaaaaaaaaaaa

SEQ ID NO: 75 - DNA, 1109 bp, Homo sapiens
actggaagaccaggcagcccagctgaaggcagtaagctcggctcacagtcgcaggagagttctggggtacacgggcaaaggggcttgagaaggcccggaggcgaagccgaagagaagcaactgtgccccggagaagagaagctcgcccattccagactgggaaccagctttcagtgaagatggcagggccagaactgttgctcgactccaacatccgcctctgggtggtcctacccatcgttatcatcactttcttcgtaggcatgatccgccactacgtgtccatcctgctgcagagcgacaagaagctcacccaggaacaagtatctgacagtcaagtcctaattcgaagcagagtcctcagggaaaatggaaaatacattcccaaacagtctttcttgacacgaaaatattatttcaacaacccagaggatggatttttcaaaaaaactaaacggaaggtagtgccaccttctcctatgactgatcctactatgttgacagacatgatgaaagggaatgtaacaaatgtcctccctatgattcttattggtggatggatcaacatgacattctcaggctttgtcacaaccaaggtcccatttccactgaccctccgttttaagcctatgttacagcaaggaatcgagctactcacattagatgcatcctgggtgagttctgcatcctggtacttcctcaatgtatttgggcttcggagcatttactctctgattctgggccaagataatgccgctgaccaatcacgaatgatgcaggagcagatgacgggagcagccatggccatgcccgcagacacaaacaaagctttcaagacagagtgggaagctttggagctgacggatcaccagtgggcactagatgatgtcgaagaagagctcatggccaaagacctccacttcgaaggcatgttcaaaaaggaattacagacctctattttttgaagaccgagcagggattagctgtgtcaggaacttggagttgcacttaaccttgtaactttgtttggagctggcacctcttgaaataaaaaggaggatgcacgagctggcaggcatgcaaaaaaaaaaaaaaaaaaaaaaaaaaaa

SEQ ID NO: 76 - DNA, 5860 bp, Homo sapiens
atgcaggagagccagaccaagagcatgttcgtgtcccgggccctggagaagatcctagccgacaaggaggtgaagcggccccagcactcccagctgcgcagggcctgccaggtggcgctcgatgaaattaaagcagaaatagaaaagcagaggcttggcactgctgcaccaccaaaggcaaacttcattgaagctgacaagtattttcttccattcgagctagcttgccagtccaagtccccaagggtagtcagcacatcccttgactgcttgcagaaactcatcgcatacgggcacatcactggcaacgcccctgacagtggagcccctgggaagcggctgatcgacagaattgttgaaaccatttgcagttgttttcagggccctcagactgatgaaggggttcagttacaaataattaaggctcttctgactgcagtgacttccccacacattgaaattcatgagggtactatcctgcagacagtgagaacatgttacaatatctatttggccagcaaaaatctcatcaatcaaaccactgccaaggctacccttactcagatgctgaacgtcattttcacccgcatggaaaaccaagtgttgcaggaggccagaagactggaaaaaccaatccagtcaaaaccccagtcccctgtgatccaagctgcagcagtatccccaaagttcgttcgtttgaagcacagtcaggcacaaagcaaaccaacaactcccgaaaaaacagatttaaccaacggtgaacatgccaggagtgattctggaaaagtaagcacagaaaatggagacgcacccagagaaagaggctcatcactgtcagggactgatgacggagcccaggaggtggtgaaggacatcttggaagatgtagtcacatctgccattaaagaagcagcggaaaagcatggtctgacagaacctgagagagttctaggtgaactggagtgccaggaatgtgctattcccccaggagttgatgaaaactcacagaccaacgggatagccgatgacaggcagtccttgtcgtcagcagataatctggaatcggatgcacaaggacatcaagtggctgccaggttctcccacgttctgcagaaggatgccttccttgtgttccgctccctgtgcaagctgtccatgaaaccccttggtgaaggccctccagacccaaaatcccatgagctgcgttccaaggtggtttccctgcagctgctcctctctgtgttgcaaaatgctggccccgtattcaggactcacgagatgttcatcaatgcaatcaagcaatatctctgtgtggccttgtccaaaaacggcgtctcttcagtgcctgatgtctttgagctctctcttgccatttttcttactcttctttcaaactttaaaatgcacttgaaaatgcagatagaggtctttttcaaagagattttcctgaacattttagaaacatcaacaagttcttttgagcacaggtggatggtcattcagactctgacgaggatctgtgcagatgcccagtgtgttgtggatatttatgtcaactacgactgtgatttaaatgctgctaacatttttgagcgccttgtaaatgatttatccaaaattgctcagggaagaagtggacatgagctgggaatgacacctctgcaggagctcagcctgaggaagaaaggcctggagtgcctcgtgtccattctcaagtgcatggtggagtggagcaaagacctgtatgtgaatcccaaccaccagaccagcctcggtcaggagaggctcacggatcaggaaataggggatgggaaaggccttgacatggcaagacggtgtagtgtgacgtccatggagtccacagtgtcctcggggacccagacaactgttcaggatgaccctgagcaatttgaggtcatcaagcaacaaaaagaaatcattgaacacggcatcgagctgttcaacaagaaacccaagagggggatccagtttctccaggagcagggcatgctgggaacgtcagttgaagacatagcccaattcctgcaccaggaggagcgcctggattccacccaagtaggcgattttctgggagatagcgcaaggttcaacaaggaggtgatgtatgcctacgtggaccaacttgacttctgtgaaaaagaatttgtctcagccctgcggacattcctagaaggtttccgcctacctggagaagcccaaaagattgaccgattaatggagaagtttgccgcaagatacatagaatgcaaccaagggcaaactctgtttgctagtgctgacactgcttatgtcctagcgtattcaattattatgctgactacagacttgcacagtcctcaggtaaaaaataaaatgacgaaagagcagtatattaaaatgaatcggggtatcaatgatagtaaagatctgccagaagagtatctctcaagcatctatgaagagatagaaggcaagaaaattgcaatgaaagaaacaaaagagctaacgattgcaaccaaatctactaagcagaatgtagctagtgaaaagcagcggcggctgctgtacaacttagagatggagcaaatggctaaaacagccaaagctctgatggaggctgtgagccatgccaaagccccgtttaccagtgccactcacctggaccatgtccggccaatgttcaaactggtgtggacgccactattggcagcctacagcatcggactccagaactgtgatgacactgaagtggcctccttgtgtttggaaggcatccgatgtgcaatccgaatcgcctgcatctttggaatgcagctggaacgagatgcctatgttcaggctcttgctcgcttctccctactcacagccagctccagcatcacaaaaatgaagcagaaaaacatcgacaccattaagacgcttatcacagtggctcacaccgatggcaactaccttgggaattcctggcatgagatcttgaaatgcatcagccagctggagctcgctcagctgataggaaccggtgtgaagacgcgctacctgtctggatctgggcgtgaaagagaagggagcctgaagggccacacattggcaggagaagagttcatgggccttggcctcggtaatttggtgagtggcggagtgaataaaagacagatggccagcttccaagaatcggttggtgagaccagctcgcagagtgtggttgtagctgtggacaggatttttactgggtctaccagactggatggaaatgcaatagttgactttgtccgctggctgtgtgctgtgtccatggatgaactggcttccccccaccatcctcgcatgttcagcttgcagaagattgtggagatatcatactacaacatgaatcggatccgactacagtggtctcgaatatggcatgtgattggagatcacttcaataaggttggctgcaaccctaatgaagatgtggctatctttgctgttgactcattaaggcaactctccatgaagtttcttgagaagggtgaattagccaacttccgtttccagaaagattttctgaggccctttgagcatattatgaagaaaaacaggtctcccaccatccgggacatggcgatccgctgcattgcccagatggtgaactcccaggcggccaacatccgctcaggctggaagaacatctttgccgtgttccaccaggcagcctctgatcatgatgggaacattgtggagctggccttccagaccacttgccacattgtcacaactattttccagcaccattttcctgcagccatcgattcctttcaggatgctgtgaagtgcttatcagagttcgcctgcaacgccgctttccctgacacgagcatggaagcgattcggctcatccgcttctgtggcaaatacgtctctgagaggcctcgggtgctacaagaatacacaagtgatgacatgaatgtagctcctggtgacagagtctgggtccgaggctggttccccatcttattcgaactctcctgcatcattaatagatgcaagttagatgtacgaacaaggggactcacagtcatgtttgagatcatgaagagctatggccacacctttgaaaagcactggtggcaggacctgttcagaatcgtgtttcggatttttgacaatatgaaactccctgagcaactgtcagagaaatctgagtggatgacaacaacctgcaatcacgcactttatgctatttgtgatgtttttacccagttttatgaagctttgaatgaagttcttctttctgatgtatttgcacaattgcagtggtgtgtcaaacaagataatgaacagttggcgcgatcaggtacaaattgcttagaaaacttagtaatatccaatggagagaaattcagtcctgaagtctgggatgaaacctgcaactgtatgttggatattttcaaaacaaccatcccacatgttttgctgacatggagacctgtaggaatggaggaagattcatcagaaaagcatttggatgtggatctggaccgccagtctttaagcagcatagataaaaatccctctgagaggggacagagccagctctctaacccaacagatgacagctggaagggtagaccatacgcaaatcagaaactgtttgccagcctcctcatcaagtgtgtggtccagttggaattgatacagaccattgacaacattgtgttctaccctgcgacgagcaaaaaggaggatgcagagcacatggttgccgcccagcaagacacgctggatgcagatatccacatagagacggaggatcagggcatgtataagtacatgtcttcccagcacctcttcaagctgttggactgtttgcaggaatcccattcattctcaaaggccttcaactccaattacgagcagcggactgtcctgtggcgagcaggttttaagggcaagtctaaacccaatcttctaaaacaagaaaccagcagcctggcctgttgtttgaggatcctgtttcgaatgtatgttgatgagaaccgcagggattcctgggaagaaatacagcagagacttttaactgtttgcagtgaagctcttgcctatttcatcactgtgaattctgagagccatcgggaggcctggacaagtctcttgttgttacttctaactaaaaccctcaaaataaatgatgaaaagttcaaagcacatgcttcaatgtactacccctacttgtgtgaaattatgcagtttgacctgatccctgagctccgagcagttctgcggaagttcttcctacggataagtgttgtgtataagatatggataccagaagagccatcacaggtaccagcagcactgtcaccagtgtggtagccctggctgcccaggccagtgctgcagctctgcagaatgttcagcatgccatttctgactggcacatctcgtgaagtttcatagaaacaaggagttggcatcttggatctcagaatggcctggaaacggatggcctctacgctgttccatcacagtctccaactaaggcttatggtatttcattaaactgttgcatacccagttagcacagtaggtggggagtctgcttcatttctatcattccatttttctgattaaactgtcaaatctgtcattgcatatgccatcgttttctagcaaaatcccatgattggctataaacgttttgtaagaagtcactctccttgaaaatactgaacatagctgtataggtttgtgattattagagaatatgttaataaaacttcttgtaacggctaactgccacctaaaatatgctgggttttctgttgtttgagtgtgttagagaaatttgaatgtttttgtcagttacgagtcagcc

SEQ ID NO: 77 - DNA, 2034 bp, Homo sapiens
gtaagagttagggtttgaccggagctagtgaggatccagcccaggctccagttgtccgcggttcctcctcctgtcgctgcccgtgtgattactgagactcagatggaccacacatccccgacctacatgcttgctaacttaacccacttgcattctgaacaacttctgcagggcttgaatcttcttcgccaacatcacgaactctgtgacatcattcttcgagtaggtgatgttaaaattcatgctcacaaagtggtacttgccagcgtcagcccgtatttcaaagctatgttcactggaaacctttctgaaaaagagaacagtgaggttgagtttcaatgcattgatgaaactgctctccaggccattgtggagtatgcctatacagggactgtttttatttctcaggacacagttgaatctctcctgccagcagcaaacctactccagataaaacttgtcctgaaagaatgttgtgcatttcttgaaagccaacttgatcctggtaattgtattggaatttctcgttttgcagaaacatatggttgccgtgacctttatttggcagccactaaatacatatgccagaattttgaagctgtttgccagactgaagagttttttgagcttacacatgctgacttggatgaaattgtttccaatgactgtttgaatgtagctaccgaagagactgttttttatgcattagagtcttggatcaagtatgatgtacaagaacgccagaaatacttagcacagttactaaacagtgtacgattaccattgttgagtgttaagtttctcactagactatatgaagcaaatcatcttattcgtgatgatcgcacttgtaaacatcttttgaatgaagccctaaagtaccactttatgcctgaacatagactctctcatcagacagtcttgatgacacgacctcgctgtgctcccaaagtactttgtgcagtaggagggaaatctggactctttgcctgtttggatagtgtggagatgtactttcctcagaatgactcttggattggtttggcacccctaaacattcctcgctatgaatttggaatatgcgttttagaccaaaaagtatatgttataggtggtattgcaactaatgtgcgtcctggcgtcactatcagaaaacatgaaaattcagtggaatgctggaatcctgatacaaatacttggacttctctagagagaatgaatgaaagccgaagtactcttggagtagtagtacttgcaggagaactttatgccttaggtggttatgatggacaatcttatttacaatctgtagagaagtacattcccaaaataagaaaatggcaacctgtggcaccaatgacgacaacaagaagttgttttgctgcagcggtattggatggaatgatatatgccattggtgggtatggtcctgcccacatgaacagtgtggagcgttatgatccaagtaaggactcctgggagatggttgcatccatggcagataaaaggattcactttggcgtgggtgtcatgctaggctttatttttgtggtgggtggacataatggagtctcacatttgtccagcattgaaagatacgatcctcatcaaaatcagtggactgtgtgtagaccaatgaaagaacctagaacaggagttggtgctgctgtaatcgataactacctttatgtcgtcggtggtcactcagggtcttcctatctgaatacagtgcagaaatatgatcctatctcagatacgtggctggattcagctggcatgatatactgtcgctgcaactttgggttaactgcactttgacaaatgtgaactctcggaaatagtatggtggtgaaacttgtactgcatgaacatccggatggcccagttttctgaaacccacaagctgcattgctttctttttaacttgaagtagcatgaaggctcaaaagttttgttgggtacttttaattgagaagtagttttggttgctcttgattacacagtaaatcaataatcaaaaagaaaaaaaaaaaa

SEQ ID NO: 78 - DNA, 2943 bp, Homo sapiens
ccgaaagagaaaacaggccgcgcgggcggcagaggagccgggcgccgcaatggacgtgcgggcgctgccgtggctgccgtggctgctgtggctgctgtgccggggcggcggcgatgcggactcccgcgcccccttcaccccgacctggccgcggagccgcgagcgtgaagccgccgccttccgggaaagtcttaatagacatcgatacttgaattctttatttcccagtgaaaactccaccgccttctatggaataaatcagttttcctatttgtttcctgaagagtttaaagccatttatttaagaagcaaaccttccaagtttcccagatactcagcagaagtacatatgtccatccccaatgtgtctttgccgttaagatttgactggagggacaagcaggttgtgacacaagtgagaaaccagcagatgtgtggaggatgctgggccttcagcgtggtgggggcagtggaatctgcttatgcaataaaggggaagcccctggaagacctaagtgtccagcaggtcattgactgttcgtataataattatggctgcaatggaggctctactctcaatgctttgaactggttaaacaagatgcaagtaaaactggtgaaagattcagaatatccttttaaagcacaaaatggtctgtgccattacttttctggttcacattctggattttcaatcaaaggttattctgcatatgacttcagtgaccaagaagatgaaatggcaaaagcacttcttacctttggccctttggtagtcatagtagatgcagtgagctggcaagattatctgggaggcattatacagcatcactgctctagtggagaagcaaatcatgcagttctcataactgggtttgataaaacaggaagcactccatattggattgtgcggaattcctggggaagttcttggggagtagatggttatgcccatgtcaaaatgggaagtaatgtttgtggtattgcagattccgtttcttctatatttgtgtgacatgttgggcagatcaagagacagctacaaaaatgaaggttttcataatgcaatgtaacatagtacttcaaagtattattcaacttcaagtttcagcaactacctacaaaagattctaaggcctagtagtatttaaactaagtttcagaatgttcccttcttgtagagagatggacaaccaaagtcagtgggacaaactccagcacagaagcctgcgaggaagcctatggaatagtttcctgtcctgagacgaaattcagattaggagatattttaggcccctgcaactggggaaggctactgtttgtttttgtttgcttattatttatttgtttgtttattgtgagatatttcaggtgggatcaaagaggtcataagaatttattttcttttgtggggtgtaactactagctttagattacccctatacacaagaatggccaacctaaaattatgtgtgtcttgtacagttagttatattagcagccctctgagatggcgtatctatcggaaggatttcaaacaccaattgctttacctgaacaaatggtgcttaccctttgaacagcagagtgaccacgtagaaggaaggaaaagggcaaaatcgcttcagttaaactgaaattaaatgaacaataaggcaactatataagtaacttctagtagcattgcctgagagacaaattattgtttgataattttcattgtgaataggaatccaatagatcatattgcttactttgttctttttatactatagaataatattttgttctctagtatatcaaaataccaaaatattatctcatattttctccctctttctcttactctttaccaagttttcctggtggcttggcttccctgactaaagaattaagtctcatttttactttccatttctattttcttaccacttggttggctccctttgtctctgtacctttaccaacattaggatctcacctctttcttcctcccttaattcataagcaccactcctatcaaagtcccatctcttaaccctgggtatcaaacaaactgtgagttttccagaatctgtttcccagttttcccctcagctttcctggtctcccatccgaactgcttctttgtgcacctcttgttctttctcttggctcccagtcttgattcctgtgatcactcttgcatcactaattgcacaagtgatttcaggtgcaattctgattagcctgcgtccacacagtgatcgatgatcctatgtgcctagaaaggacactgtgtgctgctcatgacctgcaacaggaaaaaagccatttcttgttagcagtgtaagaaccttagagcaaaggagttgaccttctgattgaatataagcacaaccatattaaatgaatcaatacaagaaaattatttctgatactatgtatgtacatatttcttctctaaaatgtatcattcttttctaatgtatatgatctaacaaaaatgaaacatgaaatgcagtagcaaccactaaaaaaaaaaattcaaggacatctaactttttctctcacttttgccctttgtttatccttccctgtgattagataaacaaaataaaaaacaaaatgctgtatttctcttcttacgccagtcagaaccaatccgaaaagaatgtgtgttgactcaggtttggagttatttcaggaagacagatattgaccttttaattgataaatattcttattatcctggaatgccagaaaagaactatgtcctgcttgtctagtttgtattcgctgactttctatgtgatatagatgcatttgtaatactctttttcaagtgctaaaggatttctaaaatttcaaactgattaatatgtttctgctgttctggattttgatgacatttacaataaaacaacctacatttgactttggtttaaaaagaaaaaaaaaaaa

SEQ ID NO: 79 - DNA, 1087 bp, Homo sapiens
agtgtacacgtcggttgcctaacaaccggcagcggactcctttggctatggcctccaactttaagaaggcaaacatggcatcaagttctcagcgaaaaagaatgagccctaagcctgagcttactgaagagcaaaagcaggagatccgggaagcttttgatcttttcgatgcggatggaactggcaccatagatgttaaagaactgaaggtggcaatgagggccctgggctttgaacccaagaaagaagaaattaagaaaatgataagtgaaattgataaggaagggacaggaaaaatgaactttggtgactttttaactgtgatgacccagaaaatgtctgagaaagatactaaagaagaaatcctgaaagctttcaagctctttgatgatgatgaaactgggaagatttcgttcaaaaatctgaaacgcgtggccaaggagttgggtgagaacctgactgatgaggagctgcaggaaatgattgatgaagctgatcgagatggagatggagaggtcagtgagcaagagttcctgcgcatcatgaaaaagaccagcctctattaagatcagtgtcttctttttctactgcaagcacatgtaactagatttagtgcctgccatggtgtgaaatctggcttttgagaacacaaacttttcccccacggacctccctttatcactttaatagtgaccttgagcctattttagccgtttggaagtgttctttgatattacagttctttgtaaaatgacctgcgaattaccctaattctcaaaagcaaaacaagagcacacaagcgtgaagaaaaggatcttaaagctttgagcacctgccattttgccttgcatcgtttccctcgtcatgcatttccacatatccacaaacacagaacgactttagacaagcacatgttacacctgtgttgccacaagcagtcattcttgacggctccagtttttatttgacacttgagtttagttttctcttttataaacccagtgaactcctgcactggcatttggatgtgtgttaatgctatttgttttgtcttaaaagtaaaacctttctcagtttgaaaaaaaaa

SEQ ID NO: 80 - DNA, 3202 bp, Homo sapiens
ttcccatccgcaccagcaagagggcccctgtgccccaaacgcgaaccgtacggctccagacagcaccgcggaactcggtggcttccagaaggccccgcgcctgcgcattccgctgcctgcgcctgcgcctgcgcctgcgccgttctcccggccgccgccttagcacctcctccggacggtgtcgccgaagtctcgcgagcccggagcgtggcacgtgggccccctccgcctccggctccgtcctcctctggccccctccgcccccggccccggccccacggcgggatgcgggacaacaccagccccatcagcgtgattctggtgagctcggggagcaggggcaataagctgctgttcaggtaccccttccagagaagccaggagcacccggcgtcccagacaagtaagccgcgtagcagatacgctgccagcaacacgggcgaccatgctgatgagcaggacggcgattccaggttttcagatgttattctggcaacaattttggcaaccaagtctgaaatgtgtggccaaaaatttgaactgaagattgataatgtgcgatttgttgggcacccaacactgctacagcatgctctggggcagatctccaaaacagatccttccccgaagagggaagcacctactatgattctttttaatgtggtgtttgcactgagggccaacgcagacccgtcagtgataaactgtctgcataacctgtcccgtcgtatcgccaccgtgctgcagcacgaggagcgccgctgccagtacctcacccgggaggccaagctgatcctggcgctccaggatgaggtgtccgccatggctgatggaaatgaaggtcctcagtccccattccatcacatcctgcccaagtgcaagctggccagggacctcaaggaagcttatgacagcctgtgcacgtcgggcgtagttcggcttcacatcaacagctggctggaggtgagcttctgcctgccccacaagatccactatgcggcctccagtctgatccccccagaggccatcgaacggagcctgaaagccatccgcccctaccatgccctgctgctgctcagtgatgagaagtccttgctgggtgagcttcctattgactgctcccctgccctagtgcgggtgatcaagaccacatctgctgtgaagaacctgcagcagctagcccaagatgcggacctggccttgctgcaggttttccagcttgcagctcatctggtgtactggggcaaggccatcatcatctacccgctgtgtgagaacaacgtctacatgctgtctcccaatgccagcgtatgtctgtactccccgctggccgagcagttctcccaccagttcccatctcatgacctgccgtccgttcttgccaagttctccttgccggtctccttgtcagaatttaggaatcccctggcccccgctgtgcaggagacccagctcatccagatggtggtgtggatgctgcagcgccggcttctcatccagctgcacacctatgtctgcctgatggcctcacccagcgaggaggagccccgtccgcgagaggacgacgtccccttcactgcccgggtcggcggtcgcagcctcagcacgcccaacgccctcagctttggctccccaaccagcagcgatgacatgaccctcaccagccccagcatggacaactccagcgcagagctacttcccagcggggactcgccactgaaccagaggatgacggagaacctgctggccagcctgtcggagcatgaacgcgcagccatcctcagtgtacccgcagcccagaaccctgaggacctccgcatgtttgccaggctccttcactacttccgcggccgccaccacctggaggagattatgtacaacgagaacacgcggcgctcccagctgctcatgctgtttgacaagttccgcagcgtgctggtggtgaccacccacgaggaccctgtcattgccgtcttccaggctctgctcccctgagcccaggcggagggcggaaggctgctggggtgcgcaggtgggcgctcgcgtctccccaccccagggctccccccgtgctgaggctgagccctcttggccctgaggcctggcattgggtggatgcgggctggccgtggcccagtgaagcctgcagagccccgctgtccttgcccctggtggttccgctgtggggctgctgccctctgtgttcctacgcttccctccagtccttgccgcacgcgtaggcatctccacgctggaggggggcctgccaggactcctgtctctgggtgaggccgcatccttcaaggcccatgtgggctgtgcgtttctcagaccctccttctgtccctacacctgctccttggaccccccagtctgtggccaccctgaagaatgtgcagaaacacttgtgtggcctgtccctgtctctctgacagccttccatttgtgaagtgccctgtggccccctccccagcacctctgtctgccatgcgcttcttcctcccaggctaccctgagcctttcctggcccagtcctcaccacagtccacagaagccacaaacaggctcatagccaagctgtgacctggtcctgaccatctggggcacgagggcctgggctggccctgctaggctggagaagccctgtcacctgtgcacatcttgctggtggaggcatggcccactgtgcaggaccccaccctcgggggctttcggctcccacactgatgattctccccagcatccacaccgggcctggcgctacgtactcaggcccccagctctcgtgtcctggaggaagagctagctccagacatgggttgatcacctagaggagctctggctaaggcacagttttctagaaataaaacatttattcgggtttggaaaggccccttggattcctggctggggacaatgatgacctggaccctggccagaagagccctggccctccagcaaggcagcacctgctctgatgcacctgtgcacccctggccctcccagccacctgggagcccgaagcttagcctgtaggtggccaagccagtccctactcttgggctgcggccacgtgaggctccgcatcagcagccaggggcgagcactagtggacaaagccagcaaatgcggcgttcctgtgagcagataccctcaaccagccagctgtcaaaagtatttcaagataaaatccaggccaagc

SEQ ID NO: 81 - DNA, 2032 bp, Homo sapiens
gttactttttaaatggacaaaagtggctctcaatccagcacatgcacattgaagcaagttaaaggatttaatatgaagcacagaagcagatagtgccaaatagcaagcagtagttgttacacatttctggaaaagcagtgtccgtgttgttatgtacacctccaaaaaaagttcaaatgtgtaggggaattgttgtgtaaagtaaactgaactgcagggtagcagtattttaatagctattatagacctgtatttactgtatttaaatgagtaaaggaacaagcagtgacacatcactaggaagggtgagcagggcagcatttccttctcccactgctgctgagatggcagaaattagtcgaattcagtacgaaatggaatatactgaaggcattagtcagcgaatgagggtcccagaaaagttaaaagtagcaccgccaaacgctgacctggaacaaggattccaagaaggagttccaaatgctagtgtgataatgcaagttccggagaggattgttgtagcaggaaataatgaagatgtttcattttcaagaccagcagatcttgaccttattcagtcaactccctttaaacccctggcactgaaaacaccacctcgtgtacttacgctgagtgaaagaccactagattttctggatttagaaagacctcctacaacccctcaaaatgaagaaatccgagcagttggcagactaaaaagagagcggtctatgagtgaaaatgctgttcgccaaaatggacagctggtcagaaatgattctctgtggcacagatcagattctgccccaagaaataaaatttcaaggttccaggcaccgatttctgcaccggagtacactgtgacaccatcgccacaacaggctcgggtctgtcctccccatatgttacctgaagatggagctaatctttcctctgctcgtggcattttgtcgcttatccagtcttctactcgtagggcataccagcagatcttggatgtgctggatgaaaatcgcagacctgtgttgcgtggtgggtctgctgccgccacttctaatcctcatcatgacaacgtcaggtatggcatttcaaatatagatacaaccattgaaggaacgtcagatgacctgactgttgtagatgcagcttcactaagacgacagataatcaaactaaatagacgtctacaacttctggaagaggagaacaaagaacgtgctaaaagagaaatggtcatgtattcaattactgtagctttctggctgcttaatagctggctctggtttcgccgctagaggtaacatcagccctcaaaaatactgtctcaacagctggaaatataaaagatttgcaaacttctttgtttctgtctctgcattgtatgccattttatagtccacaccctgaaaatgtatttcttccagaaagtctggaggaaggacctatatttgtagaagtaaaggtatattctgtcactcagctgtattcacgtctgagcagttctgcagtaacacctgcttaaaattctccctttgcatgttttgtaaataggctccagttttgttttttaaaaggaatttattttttgcctcatcagtccacccaactgattctgaatgggagagagtctgtagagaattgattcagaaaagtgtctgtgaaagaaaaacaattattttgtcctgtttctcaaacagtgttaagcagttttgttaatagacatttttgcatcgacacttcaacattaacactttgaaagtcatggtctggtgccagatttaagaaactcgaaccacctaatatttcataaccttcttcattaggtacttgtacagattaatttctaacattgcagcagtttcatatgtgtgcaatatgtgcattctttcattttagttttgcacttggttttctataaagtacgtttttactcagttcatgcgtgaacaatttaaaaaacgacagaataaggtacaaatgtagtgtatttaataaactgtcaaccaaagaaaaaaaaaaaaaaaaaaaaaaa

SEQ ID NO: 82 - DNA, 3426 bp, Homo sapiens
aattccgggcggcggcggccgaggctgaaggaagatggcggacggcgtggaccacataaacatttacgcggatgtcggcgaagagttcaaccaggaagctgaatatggtgggcatgatcagatagatttgtatgacgatgtcatatctccatctgcaaataatggagatgccccagaagaccgagattacatggatactctcccaccaactgttggtgatgatgtgggtaaaggagcagcaccaaatgttgtctatacatatactggaaagagaattgcattatatattggaaatctaacatggtggacaacagatgaagacttaactgaagcagttcattctttgggagtaaatgatattttggagataaaattttttgaaaatcgagcaaatggccagtcaaaggggtttgcccttgttggtgttggatctgaagcatcttcaaaaaagttaatggatctgttacctaaaagagaacttcatggtcagaatcctgttgtaactccatgcaataaacagttcctgagtcaatttgaaatgcagtccaggaaaactacacaatcaggacaaatgtctggggaaggtaaagctggtcctccaggaggcagttcccgtgcagcatttccacaaggtggtagaggacggggccgttttccaggggctgttcctggtggggacagatttcctgggccagcaggaccaggagggccacccccaccttttccagctggacagactccaccacgtccacccttaggtcctccaggcccacctggtccaccaggtcctccacctcctggtcaggttctgcctcctcctctagctgggcctcctaatcgaggagatcgccctccaccaccagttctttttcctggacaaccttttgggcagcctccattgggtccacttcctcctggccctccacctccagttccaggctacggcccccctcctggcccaccacctccacaacagggaccacctccacctccaggcccctttccacctcgtccacccggtccacttgggccaccccttacactagctcctcctccgcatcttcctggaccacctccaggtgccccaccgccagctccgcatgtgaacccagctttctttcctccaccaactaacagtggcatgcctacatcagatagccgaggtccaccaccaacagatccatatgggcgacctccaccatatgataggggtgactatggcccccctggaagggaaatggatactgcaagaacgccattgagtgaagctgaatttgaagaaatcatgaatagaaatagggcaatctcaagcagtgctatttcgagagctgtgtctgatgccagtgctggtgattatgggagtgctattgagacactggtaactgcaatttctttaattaaacaatccaaagtatctgctgatgatcgttgcaaagttcttattagttctttgcaagattgccttcatggaattgagtccaagtcttatggttctggatcaagacgtgaacgatcaagagagagggaccatagtagatcacgagaaaagagtcgacgtcataaatcccgtagtagagaccgtcatgacgattattacagagagagaagcagagaacgagagaggcaccgggatcgtgaccgagaccgtgaccgagagcgtgaccgagagcgcgaatatcgtcatcgttagaagctgaaggaagaggatcaccttccaagacaaaacagtcttcatgggccaaaaatgacgcttgtccagcagtttgcttcttgtgattgaactgaacctgtaaggattcatggataaaatgaacaggaatagatctgaataaagcaaatctgcataaatggtaaccagtagctctacttttattttttatgttgcttaactgttttatttgaaggaaacctgtgtgatttaaaaagttatagcttttgcaactttattactggttatatacatttggccattatgatgtgcaagcaattggaaaaaaagtcaagtaaatgcttgtttttgtagtagtttgttcttgttaaaaatgtttatatgataatgtctgtaaacagcatcactttgattacaatagatgtagtgttgtaataaactgtttaatggggctgatgtgtaaagctgttcaagttatttgatgtttacacctcagggaaagtcttgtgttcagcaatatctaaagataatgttactatgacaacatttttactgtcctttaaagcattgcaatagcgtttttggatatgcctcaatctaatcttgcgttcagtgaattaaacatagtaattaagtgtcttttgcccttgattttgatattagaataggtgattacatggatatttaatatttctatattctgcttttctagctgtttttacctagttagcttgtgactttgctgaatggtatgtaaacttgtaaaaatagagatttgacagacatagcaatctagtcaatgtgtaaggggtcaaaaaaaacagaggttttaacacataagtaaaaacccgtacatatttgatgtgtaatgcaggttaattacaacacagatgtaccgaaacacttaattgtgaaccgctaacattgaagaaattttgacaattccgatttgatgctgcaattacttgctgtttttattgatcttatggtttatttcttaagccatagtcagtgtaaatacagccctgcagcaggtaaatgtgagtaaagagagccttatattttccaattggtataaaatttttgaaggatgtgatgttcattaacattcggttgtattccccagtatttgtaatgggaaattacagataaaccgtgtctgcacagtttaaggaatactatgtatattcatgcaccgtattgattcatgctatagttacttaatcaaagatttttttcaaacctgccttacatataggcccactttaaaagcacctgactagcatgtgttcttgattgcaaaattggcagaggcagggtgtcaacttgattaggtgtttttatgggaatgtaatttgaaatcactacttcagaaatttgacttaaaattcttgagcacgttaatatgtttttaagatctgattatctttgagagatcttctgttaatacacattggttgttaaagagtacccaaattctaggacaatgcttaaagtgttaaaataccctagatactgtgttatgtgcaactgtagaaaccctccagaaatttccactgctgttcttcactttcatcttgtctgctatcaaaccacttctgacaaaattagctgttttgaattacccatatcactgccagttttattttaaaatattttgtgtttgaagtatctgtgcatgggatcgttgatgtttatcagaactgttcactttcagaaatgattttttaaagcattttgttgaaatgcggttgctt

SEQ ID NO: 83 - DNA, 5601 bp, Homo sapiens
ggcccggctgcgaggaggaggcggcggcggcgcaggaggatgtacttggtggcgggggacagggggttggccggctgcgggcacctcctggtctcgctgctggggctgctgctgctgctggcgcgctccggcacccgggcgctggtctgcctgccctgtgacgagtccaagtgcgaggagcccaggaactgcccggggagcatcgtgcagggcgtctgcggctgctgctacacgtgcgccagccagaggaacgagagctgcggcggcaccttcgggatttacggaacctgcgaccgggggctgcgttgtgtcatccgccccccgctcaatggcgactccctcaccgagtacgaagcgggcgtttgcgaagatgagaactggactgatgaccaactgcttggttttaaaccatgcaatgaaaaccttattgctggctgcaatataatcaatgggaaatgtgaatgtaacaccattcgaacctgcagcaatccctttgagtttccaagtcaggatatgtgcctttcagctttaaagagaattgaagaagagaagccagattgctccaaggcccgctgtgaagtccagttctctccacgttgtcctgaagattctgttctgatcgagggttatgctcctcctggggagtgctgtcccttacccagccgctgcgtgtgcaaccccgcaggctgtctgcgcaaagtctgccagccgggaaacctgaacatactagtgtcaaaagcctcagggaagccgggagagtgctgtgacctctatgagtgcaaaccagttttcggcgtggactgcaggactgtggaatgccctcctgttcagcagaccgcgtgtcccccggacagctatgaaactcaagtcagactaactgcagatggttgctgtactttgccaacaagatgcgagtgtctctctggcttatgtggtttccccgtgtgtgaggtgggatccactccccgcatagtctctcgtggcgatgggacacctggaaagtgctgtgatgtctttgaatgtgttaatgatacaaagccagcctgcgtatttaacaatgtggaatattatgatggagacatgtttcgaatggacaactgtcggttctgtcgatgccaagggggcgttgccatctgcttcactgcccagtgtggtgagataaactgcgagaggtactacgtgcccgaaggagagtgctgcccagtgtgtgaagatccagtgtatccttttaataatcccgctggctgctatgccaatggcctgatccttgcccacggagaccggtggcgggaagacgactgcacattctgccagtgcgtcaacggtgaacgccactgcgttgcgaccgtctgcggacagacctgcacaaaccctgtgaaagtgcctggggagtgttgccctgtgtgcgaagaaccaaccatcatcacagttgatccacctgcatgtggggagttatcaaactgcactctgacagggaaggactgcattaatggtttcaaacgcgatcacaatggttgtcggacctgtcagtgcataaacaccgaggaactatgttcagaacgtaaacaaggctgcaccttgaactgtcccttcggtttccttactgatgcccaaaactgtgagatctgtgagtgccgcccaaggcccaagaagtgcagacccataatctgtgacaagtattgtccacttggattgctgaagaataagcacggctgtgacatctgtcgctgtaagaaatgtccagagctctcatgcagtaagatctgccccttgggtttccagcaggacagtcacggctgtcttatctgcaagtgcagagaggcctctgcttcagctgggccacccatcctgtcgggcacttgtctcaccgtggatggtcatcatcataaaaatgaggagagctggcacgatgggtgccgggaatgctactgtctcaatggacgggaaatgtgtgccctgatcacctgcccggtgcctgcctgtggcaaccccaccattcaccctggacagtgctgcccatcatgtgcagatgactttgtggtgcagaagccagagctcagtactccctccatttgccacgcccctggaggagaatactttgtggaaggagaaacgtggaacattgactcctgtactcagtgcacctgccacagcggacgggtgctgtgtgagacagaggtgtgcccaccgctgctctgccagaacccctcacgcacccaggattcctgctgcccacagtgtacagatcaaccttttcggccttccttgtcccgcaataacagcgtacctaattactgcaaaaatgatgaaggggatatattcctggcagctgagtcctggaagcctgacgtttgtaccagctgcatctgcattgatagcgtaattagctgtttctctgagtcctgcccttctgtatcctgtgaaagacctgtcttgagaaaaggccagtgttgtccctactgcatagaagacacaattccaaagaaggtggtgtgccacttcagtgggaaggcctatgccgacgaggagcggtgggaccttgacagctgcacccactgctactgcctgcagggccagaccctctgctcgaccgtcagctgcccccctctgccctgtgttgagcccatcaacgtggaaggaagttgctgcccaatgtgtccagaaatgtatgtcccagaaccaaccaatatacccattgagaagacaaaccatcgaggagaggttgacctggaggttcccctgtggcccacgcctagtgaaaatgatatcgtccatctccctagagatatgggtcacctccaggtagattacagagataacaggctgcacccaagtgaagattcttcactggactccattgcctcagttgtggttcccataattatatgcctctctattataatagcattcctattcatcaatcagaagaaacagtggataccactgctttgctggtatcgaacaccaactaagccttcttccttaaataatcagctagtatctgtggactgcaagaaaggaaccagagtccaggtggacagttcccagagaatgctaagaattgcagaaccagatgcaagattcagtggcttctacagcatgcaaaaacagaaccatctacaggcagacaatttctaccaaacagtgtgaagaaaggcaactaggatgaggtttcaaaagacggaagacgactaaatctgctctaaaaagtaaactagaatttgtgcacttgcttagtggattgtattggattgtgacttgatgtacagcgctaagaccttactgggatgggctctgtctacagcaatgtgcagaacaagcattcccacttttcctcaagataactgaccaagtgttttcttagaaccaaagtttttaaagttgctaagatatatttgcctgtaagatagctgtagagatatttggggtggggacagtgagtttggatggggaaatgggtgggagggtggtgttgggaagaaaaattggtcagcttggctcggggagaaacctggtaacataaaagcagttcagtggcccagaggttatttttttcctattgctctgaagactgcactggttgctgcaaagctcaggcctgaatgagcaggaaacaaaaaaggccttgcgacccagctgccataaccaccttagaactaccagacgagcacatcagaaccctttgacagccatcccaggtctaaagccacaagtttcttttctatacagtcacaactgcagtaggcagtgaggaagccagagaaatgcgatagcggcatttctctaaagcgggttattaaggatatatacagttacactttttgctgcttttattttcttccaagccaatcaatcagccagttcctagcagagtcagcacatgaacaagatctaagtcatttcttgatgtgagcactggagcttttttttttttacaacgtgacaggaagaggagggagagggtgacgaacaccaggcatttccaggggctatatttcactgtttgttgttgctttgttctgttatattgttggttgttcatagtttttgttgaagctctagcttaagaagaaactttttttaaaaagactgtttggggattctttttccttattatatactgattctacaaaatagaaactacttcattttaattgtatattattcaagcacctttgttgaagctcaaaaaaaatgatgcctctttaaactttagcaattataggagtatttatgtaactatcttatgcttcaaaaaacaaaagtatttgtgtgcatgtgtatataatatatatatatacatatatatttatacacatacaatttatgttttcctgttgaatgtatttttatgagattttaaccagaacaaaggcagataaacaggcattccatagcagtgcttttgatcacttacaaattttttgaataacacaaaatctcattctacctgcagtttaattggaaagatgtgtgtgtgagagtatgtatgtgtgtgtgtgtgtgtgtgtgtgtgcgcgcgcacgcacgccttgagcagtcagcattgcacctgctatggagaagggtattcctttattaaaatcttcctcatttggatttgctttcagttggttttcaatttgctcactggccagagacattgatggcagttcttatctgcatcactaatcagctcctggattttttttttttttttttcaaacaatggtttgaaacaactactggaatattgtccacaataagctggaagtttgttgtagtatgcctcaaatataactgactgtatactatagtggtaacttttcaaacagcccttagcacttttatactaattaacccatttgtgcattgagttttcttttaaaaatgcttgttgtgaaagacacagatacccagtatgcttaacgtgaaaagaaaatgtgttctgttttgtaaaggaactttcaagtattgttgtaaatacttggacagaggttgctgaactttaaaaaaaattaatttattattataatgacctaatttattaatctgaagattaaccatttttttgtcttagaatatcaaaaagaaaaagaaaaaggtgttctagctgtttgcatcaaaggaaaaaaagatttattatcaaggggcaatatttttatcttttccaaaataaatttgttaatgatacattacaaaaatagattgacatcagcctgattagtataaattttgttggtaattaatccattcctggcataaaaagtctttatcaaaaaaaattgtagatgcttgctttttgttttttcaatcatggccatattatgaaaatactaacaggatataggacaaggtgtaaatttttttattattattttaaagatatgatttatcctgagtgctgtatctattactcttttactttggttcctgttgtgctcttgtaaaagaaaaatataatttcctgaagaataaaatagatatatggcacttggagtgcatcatagttctacagtttgtttttgttttcttcaaaaaagctgtaagagaattatctgcaacttgattcttggcaggaaataaacattttgagttgaaatcaaaaaaaaaaaaaaaaaa

SEQ ID NO: 84 - DNA, 2271 bp, Homo sapiens
gcctcgcggcaggagcgggatttccggggtcacgggaaccggcaggggaacgggataaagttcccggagaaaggaaaggagagcgtgggatagtaaaagagaagacgcggagaagaggagaggacctacaagaacggaggacaggggcgcacgatggtcccggggggagcggaaacaaaggcacgcaaaacggaaaagcgtgtgtaggggagcggaaaaggaagtcaccaccgtggcctgcgacgaaatggcgaaaagtcttttgaagacagcctctctgtctggaaggacaaaattgctacatcaaacaggattgtcactttatagtacatcccatggattttatgaggaagaagtgaaaaaaacacttcagcagtttcctggtggatccattgaccttcagaaggaagacaatggcattggcattcttactctgaacaatccaagtagaatgaatgccttttcaggtgttatgatgctacaacttctggaaaaagtaattgaattggaaaattggacagaggggaaaggcctcattgtccgtggggcaaaaaatactttctcttcaggatctgatctgaatgctgtgaaatcactaggaactccagagacttcctttaataagtgttgcgctggttcaaggttgggcattgggtggaggagcagaatttactacagcatgtgatttcaggttaatgactccagagagtaagatcagattcgtccacaaagagatgggcataataccaagctggggtggcaccacccggctagttgaaataatcggaagtagacaagctctcaaagtgttgagtggggcccttaaactggattcaaaaaatgctctaaacataggaatggttgaagaggtcttgcagtcttcagatgaaactaaatctctagaagaggcacaagaatggctaaagcaattcatccaagggccaccggaagtaattagagctttgaaaaaatctgtttgttcaggcagagagctatatttggaggaagcattacagaacgaaagagatcttttaggaacagtttggggtgggcctgcaaatttagaggctattgctaagaaaggaaaatttaataaataattggtttttcgtgtggatgtactccaagtaaagctccagtgactaatatgtataaatgttaaatgatattaaatatgaacatcagaattactttgaaggctactattaatatgcagacttacttttaatcatttgaatatctgaactcatttacctcatttcttgccaattactcacttgggtatttactgcgtaatctggaacatttagctaaaatatacacttttggcttaaaaattattgctgtcaattccaataataattcttagcttataaccaaagagcagtgtttaaaaggagagcttctatacaaaacctattcctggcgttacttttcatacaatttttgttctgttttacctggaaataatttaccaaaataactgagtgttgctgctaaagaacaaaagtggggaggtatcagggaacaagaaaacaagaaagggtatgatcaatcattttcttctgctccaaacagctggagtaaaattcatgggaaatggcccttcatttaaaaaaagatgtacctcactacccactacaaatttggaactttgttcttttcaataattagttttctattgtaaattacctactaaacagtggtagccatgacatggaaagtcaactgattctacaattggacattcatttgtgtgccctggaatttccaactagtaataaacaactactgttgatgtagttttaaaccacttgaagggactcatgaagcatcctgcaacataaatttgcatttttacatcagatttcttttttttcctgaaaaacaactaaccttctaacaactatctttcaaaagtaaatgtaataaaaatgcacaacataaaatgtttatgatcccagcaatacactttttaaaaaatgtgaaagtcaaagaattaagttctagttctgactcatcacaagaggtcaaaagtatttgctactgtaacattcaattcacatttgagaatcatggtaaaaataacttgcatttgccttaccatcatgatcctactgttgagttaggaaaatatggttagacagactcacattactttttttcagaggtaaactctagattactgtgtcaacccaatactatttggccatagatgtaaaaactaccaaataaaagtggattttgtggtctacaaaaaaaaaaaaaaaa

SEQ ID NO: 85 - DNA, 2697 bp, Homo sapiens
tggatatgggactcctgtttgtggcctgcctctcttccgagtcttccagtgcagtccagataacgatctctgagagtctcttgagaccactgaagcaagaggcttcaaggtttgttctaggcttctctagttggcaggtcttccccgatcccaccccctcccccagggctgccaggcgtattcctgcctgggcctcctggcacaagagataaaatgaacagggttactcccagtaactggtccaggagataccagcagagagggagtaggagagaagaaacatgtcagggtgctcacaggagtagtggggggaggttttgctatttccagattcttaagccaacaaaagtgccttcatattttctgtctggaagacagaaagcccagaaggagcccagaagcaacagtttgagagaggcgcttctgcggccaagtggataagaggagcggcctgcaaccatgggacagggtgagccaagccagcgctcgacagggcttgctggactgtatgcagcccccgcagcatcacctgttttcattaaaggaagtgggatggatgccctgggtatcaagagctgtgactttcaggcagcaagaaacaatgaggagcaccacaccaaggccctcagctcccggcgcctctttgtgaggagggggcagcccttcaccatcatcctgtacttccgcgctccagtccgtgcatttctgcctgccctgaagaaggtggccctcactgcacaaactggagagcagccttccaagatcaacaggacccaagccacattcccaatttccagtctgggggaccgaaagtggtggagtgcagtggtggaggagagagatgcccagtcctggaccatctctgtgaccacacctgcggacgctgtcattggccactactcgcttctgctgcaggtctcaggcaggaagcaactcctcttgggtcagttcacactgctttttaacccctggaatagagaggatgctgttttcctgaagaatgaggctcagcgcatggagtacttgttgaaccagaatggtctcatctacctgggtacagctgactgcatccaggcagagtcctgggactttggccagttcgagggggatgtcattgacctcagcctgcgcttgctgagcaaggacaagcaggtagagaagtggagccagccggtgcacgtggcccgtgtgttgggtgccttgctgcattttctcaaggagcagagggtcctgcccaccccgcagacccaggccacccaggaaggggccttgctgaacaagcgccggggcagcgtgcccatcctgcggcagtggctcaccggccgaggccgacctgtgtatgatggccaggcctgggtgttggctgctgttgcttgcacagtgctgcgatgcctgggaatccctgcccgcgtggtgaccacgtttgcctcagcacagggcaccggtgggcgtcttctcatagatgaatactataatgaggagggacttcagaacggagaaggccagagaggcagaatctggatcttccagacttccacagagtgctggatgacgcggcctgccttgccccagggttatgatggatggcagattctcgacccaagtgctcctaatggaggtggagtcctggggtcctgtgatctggtgccggtcagagcagtcaaggaggggaccgtggggctgaccccagcagtgtcagacctttttgctgccataaatgcctcatgtgtggtctggaagtgctgtgaggatgggacactggagttgactgactccaacacaaagtatgttggcaacaacatcagcaccaagggtgtgggcagtgaccgctgcgaggacatcactcagaactacaagtatcctgaagggtctcttcaggaaaaagaggtgctggagagagtcgagaaagagaaaatggaacgtgagaaagacaacggcatccgtcctcccagtctcgagactgccagtcctctgtacctgctcttgaaagcacccagctccctacccctgagaggggatgcccagatctcagtgacgctggttaatcacagtgagcaggagaaggcagtgcagctggcaattggggtccaggctgtacactacaacggtgtccttgctgccaagctctggaggaagaagctgcacctcacgctcagtgccaacctggaaaagataataaccatcggcctgttcttctccaattttgagcgaaacccacccgagaacaccttccttagactcaccgccatggcaacacactctgaatccaaccttagctgctttgctcaggaagacattgccatttgtagaccacaccttgccatcaagatgccagagaaagcagagcagtatcaacccctcacagcctcagtcagcctccagaactccctagatgcccccatggaggactgtgtgatctccatcctgggaagggggctcattcacagagagaggagctacagattccgttcagtgtggcctgaaaacaccatgtgtgccaagttccagttcacgccaacacatgtggggctccagagactcactgtggaagtggactgcaacatgttccagaacctaaccaactataaaagcgtcaccgtggtagcccctgaactatcagcttaaacttccagctctatcaccactctcctgccaacccttgttctacaatctaaaccaaacatgtgctaggaagag

SEQ ID NO: 86 - DNA, 4034 bp, Homo sapiens
atgcaggcgacgccgagtgaggctgaggctgggggcgaatcgccgcagagctgcgtgtcggcggcgcattctgattggacagcggggaagcccgtcagcctgttggccccgctgatcccgccccgtagcgcagggcagcctttaacctttagccccagtgggcgccagccactcagatcgcttcttgttggtatgtgtagcggcagtggccgccggcggagcagtctgagcccgacgatgaggccggggacgggagctgagcgtggaggcctcatggtgagtgaaatggagagccatcctccctcgcagggtcctggggacggggagcggagattgtccggctcaagcctctgctccggctcttgggtctctgctgacggcttcctgaggagacggccctcgatggggcaccctggcatgcattatgccccaatgggaatgcaccctatgggtcagagagcgaatatgcctcctgtacctcatggaatgatgccgcagatgatgccccctatgggagggccaccaatgggacaaatgcctggaatgatgtcgtcagtaatgcctggaatgatgatgtctcatatgtctcaggcttccatgcagcctgccttaccgccaggagtaaatagtatggatgtagcagcaggtacagcatctggtgcaaaatcaatgtggactgaacataaatcacctgatggaaggacttactactacaacactgaaaccaaacagtctacctgggagaaaccagatgatcttaaaacacctgctgagcaactcttatctaaatgcccctggaaggaatacaaatcagattctggaaagccttactattataattctcaaacaaaagaatctcgctgggccaaacctaaagaacttgaggatcttgaagcaatgatcaaagctgaagaaagcagtaagcaagaagagtgcaccacaacatcaacagccccagtccctacaacagaaattccgaccacaatgagcaccatggctgctgccgaagcagcagctgctgttgttgcagcagcagcagcggcagcagcagcagcagctgcagccaatgctaatgcttccacttctgcttctaatactgtcagtggaactgttccagttgttcctgagcctgaagttacttccattgttgctactgttgtagataatgagaatacagtaactatttcaactgaggaacaagcacaacttactagtacccctgctattcaggatcaaagtgtggaagtatccagtaatactggagaagaaacatctaagcaagaaactgtagctgattttactcccaaaaaagaagaggaggagagccaaccagcaaagaaaacatacacttggaatacaaaggaagaggcaaagcaagcttttaaagaattattgaaagaaaagcgggtaccatcgaatgcttcatgggagcaggctatgaaaatgattattaatgatccacgatacagtgctttggcaaagttaagtgaaaaaaagcaagcctttaatgcctataaagtccagacagaaaaagaagaaaaagaagaagcaagatcaaagtacaaagaggctaaggaatcctttcagcgttttcttgaaaatcatgagaaaatgacttctacaaccagatacaaaaaagcagagcaaatgtttggagagatggaagtttggaatgcaatatcagaacgtgatcgtcttgaaatctatgaagatgttttgttctttctttcaaaaaaagaaaaggaacaagcaaagcagttgcgaaagagaaattgggaagccttaaaaaacatacttgacaacatggctaatgtaacatactctaccacttggtctgaagcccagcagtatctgatggataatccaacttttgcagaagatgaggagttacaaaatatggacaaagaagatgcattaatttgctttgaagaacacattcgggctttagaaaaggaggaagaagaagaaaaacagaagagtttgctgagagaaaggagacgacagcgaaaaaatagggaatctttccagatatttttagatgaattacatgaacatggacaactgcattctatgtcatcttggatggaattgtatccaactattagttctgatattagattcactaatatgcttggtcagcctggatcaactgcacttgatcttttcaagttttatgttgaggatcttaaagcacgttatcatgacgagaagaagataataaaagacattctaaaggataaaggatttgtagttgaagtaaacactacttttgaagattttgtggcgataatcagttcaactaaaagatcaactacattagatgctggaaatatcaaattggctttcaatagtttactagaaaaggcagaagcccgtgaacgtgaaagagaaaaagaagaggctcggaagatgaaacgaaaagaatctgcatttaagagtatgttaaaacaagctgctcctccgatagaattggatgctgtctgggaagatatccgtgagagatttgtaaaagagccagcatttgaggacataactctagaatctgaaagaaaacgaatatttaaagattttatgcatgtgcttgagcatgaatgtcagcatcatcattcaaagaacaagaaacattctaagaaatctaaaaaacatcataggaaacgttcccgctctcgatcggggtcagattcagatgatgatgatagccattcaaagaaaaaaagacagcgatcagagtctcgttctgcttcagaacattcttctagtgcagagtctgagagaagttataaaaagtcaaaaaagcataagaagaaaagtaagaagaggagacataaatctgactctccagaatccgatgctgagcgagagaaggataaaaaagaaaaagatcgggaaagtgaaaaagacagaactagacaaagatcagaatcaaaacacaaatcgcctaagaaaaagactggaaaggattctggtaattgggatacttctggcagcgaactgagtgaaggggaattggaaaagcgcagaagaacccttttggagcaactggatgatgatcaataaattataccaaatatatgtttacagtatgatttaaagtctgattcagaccagggactctattttaagttcaactgaaataacactgggttttaattatatcacaggaaaaaaaaagtgcatttaagtattgttatcgtggactttataaaagcaaaggaaattgaaagtaacttttgattctgtatcaagaatcatattttcatacagtcataactgtctttctgtgaccctttcacagggcactgtaggatggattaaaggtggcaatttactgataactgcagatgtctctactttgttctaaaatctaagtcatgaggtgatttgatttactttatagaagctggattttgaagatctaatgaaaaattttttgataatatagtagtacaaaaaaagcaccagcaactgataaaaattgcttttttgtgcgctacccaactggttaaagccaatgtgatcttttatggtgaaactcctaagaaacaggtggttttgctggaaacttggtagacccttaattatagtggtgctaatgagcactactgtaatataaagccaccattattttttatcaaacatctgaatacattttacaaaggctattgtgagggcattattttgagcatctattttgaggtgatgtttaaaaaaactttaacatcaaatcaaattgtaaattaatttaaatatattgccttaaggacctactaaagaatgtgccaccagactttaagtgatagttgcaatatccttgtctaaaaaaaaaaaaaaagttgacttaaacattttctttaacagttgtcttttttttctaaattcagtctttctcttgcttttttttccctgctattgaggaagtattttgccttccctactcactgagaagtattgacttcgtggtacacattctaaagcatttctgatttgaatatttttgtacatttttatcaattattaaaccttctcttctagtg

SEQ ID NO: 87 - DNA, 5138 bp, Homo sapiens
gatccgcagaggagcccacttgagagcgcctcctgtcgtctgtaaggttgccttgccatccctcggcaccccaacttcccccgcccccccatcgcctcctcctccatcctccagttcaaaatggcgacggcggcggcagcggcggcggtgatggctcctccgggctgcccgggttcgtgccccaacttcgccgtagtctgctccttcttggagcgctacgggccgctgctagacctgcctgagttgccgttccctgagctggagcgggtgctgcaggcgccgccgccggacgtcggcaacggagaagtaccaaaagaattggtggagctccatttgaagctgatgaggaaaattggcaaatctgttactgcagacagatgggaaaaatatttgatcaagatatgccaagagtttaacagtacctgggcatgggagatggagaagaagggctatcttgaaatgagtgttgaatgcaaactagcactcttaaagtacctctgtgagtgtcagtttgatgacaatctcaaattcaagaatattattaatgaggaggatgccgatactatgcgtctccagccaattggtcgagacaaagatggcctcatgtactggtaccaattggatcaagatcacaatgtcagaatgtacatagaagaacaagatgatcaagatggctcttcatggaaatgcattgtcagaaatcgaaacgagttggctgagactcttgcactcctgaaagcacaaattgatcctgtactattgaaaaactctagccaacaagacaactcttctcgggaaagtcccagcttagaggatgaggagactaaaaaagaggaagaaacacctaaacaagaggaacagaaagaaagtgaaaagatgaaaagtgaggagcagcctatggatttagaaaaccgttctacagccaatgttctagaagagactactgtgaaaaaagaaaaagaagatgaaaaggaacttgtgaaactgccagtcatagtgaagctagaaaaacctttgccagaaaatgaagaaaaaaagattatcaaagaagaaagtgattccttcaaggaaaatgtcaaacccattaaagttgaggtgaaggaatgtagagcagatcctaaagataccaaaagtagcatggagaagccagtggcacaggagcctgaaaggatcgaatttggtggcaatattaaatcttctcacgaaattactgagaaatctactgaagaaactgagaaacttaaaaatgaccagcaggccaagataccactaaaaaaacgagaaattaaactgagtgatgattttgacagtccagtcaagggacctttgtgtaaatcagttactccaacaaaagagtttttgaaagatgaaataaaacaagaggaagagacttgtaaaaggatctctacaatcactgctttgggtcatgaagggaaacagctggtaaatggagaagttagtgatgaaagggtagctccaaattttaagacagaaccaatagagacaaagttttatgagacaaaggaagagagctatagcccctctaaggacagaaatatcatcacggagggaaatggaacagagtccttaaattctgtcataacaagtatgaaaacaggtgagcttgagaaagaaacagcccctttgaggaaagatgcagatagttcaatatcagtcttagagatccatagtcaaaaagcacaaatagaggaacccgatcctccagaaatggaaacttctcttgattcttctgagatggcaaaagatctctcttcaaaaactgctttatcttccaccgagtcgtgtaccatgaaaggtgaagagaagtctcccaaaactaagaaggataagcgcccaccaatcctagaatgtcttgaaaagttagagaagtccaaaaagacttttcttgataaggacgcacaaagattgagtccaataccagaagaagttccaaagagtactctagagtcagaaaagcctggctctcctgaggcagctgaaacttctccaccatctaatatcattgaccactgtgagaaactagcctcagaaaaagaagtggtagaatgccagagtacaagtactgttggtggccagtctgtgaaaaaagtagacctagaaaccctaaaagaggattctgagttcacaaaggtagaaatggataatctggacaatgcccagacctctggcatagaggagccttctgagacaaagggttctatgcaaaaaagcaaattcaaatataagttggttcctgaagaagaaaccactgcctcagaaaatacagagataacctctgaaaggcagaaagagggcatcaaattaacaatcaggatatcaagtcggaaaaagaagcccgattctccccccaaagttctagaaccagaaaacaagcaagagaagacagaaaaggaagaggagaaaacaaatgtgggtcgtactttaagaagatctccaagaatatctagacccactgcaaaagtggctgagatcagagatcagaaagctgataaaaaaagaggggaaggagaagatgaggtggaagaagagtcaacagctttgcaaaaaactgacaaaaaggaaattttgaaaaaatcagagaaagatacaaattctaaagtaagcaaggtaaaacccaaaggcaaagttcgatggactggttctcggacacgtggcagatggaaatattccagcaatgatgaaagtgaagggtctggcagtgaaaaatcatctgcagcttcagaagaggaggaagaaaaggaaagtgaagaagccatcctagcagatgatgatgaaccatgcaaaaaatgtggccttccaaaccatcctgagctaattcttctgtgtgactcttgcgatagtggataccatactgcctgccttcgccctcctctgatgatcatcccagatggagaatggttctgcccaccttgccaacataaactgctctgtgaaaaattagaggaacagttgcaggatttggatgttgccttaaagaagaaagagcgtgccgaacgaagaaaagaacgcttggtgtatgttggtatcagtattgaaaacatcattcctccacaagagccagacttttctgaagatcaagaagaaaagaaaaaagattcaaaaaaatccaaagcaaacttgcttgaaaggaggtcaacaagaacaaggaaatgtataagctacagatttgatgagtttgatgaagcaattgatgaagctattgaagatgacatcaaagaagccgatggaggaggagttggccgaggaaaagatatctccaccatcacaggtcatcgtgggaaagacatctctactattttggatgaagaaagaaaagaaaataaacgaccccagagggcagctgctgctcgaaggaagaaacgccggcgattaaatgatctggacagtgatagcaacctggatgaagaagagagcgaggatgaattcaagatcagtgatggatctcaagatgagtttgttgtgtctgatgaaaacccagatgaaagtgaagaagatccgccatctaatgatgacagtgacactgacttttgtagccgtagactgaggcgacacccctctcggccaatgaggcagagcaggcgtttgcgaagaaagaccccaaagaaaaaatattccgatgatgatgaagaggaggaatctgaggagaatagtagagactctgaaagtgacttcagtgatgattttagtgatgattttgtagaaactcggcgaaggcggtcaaggagaaatcagaaaagacaaattaactacaaagaagactcagaaagtgacggttcccagaagagtttgcgacgtggtaaagaaataaggcgagtacacaagcgaagactttccagctcagagagtgaagagagctatttgtccaagaactctgaagatgatgagctagctaaagaatcaaagcggtcagttcgaaagcggggccgaagcacagacgagtattcagaagcagatgaggaggaggaggaagaggaaggcaaaccatcccgcaaacggctacaccggattgagacggatgaggaggagagttgtgacaatgctcatggagatgcaaatcagcctgcccgtgacagccagcctagggtcctgccctcagaacaagagagcaccaagaagccctaccggatagaaagtgatgaggaagaggactttgaaaatgtaggcaaagtggggagcccattggactatagcttagtggacttaccttcaaccaatggacagagccctggcaaagccattgagaacttgattggcaagcctactgagaagtctcagacccccaaggacaacagcacagccagtgcaagcctagcctccaatgggacaagtggtgggcaggaggcaggagcaccagaagaggaggaagatgagcttttgagagtgactgaccttgttgattatgtctgtaacagtgaacagttataagactttttttccatttttgtgctaatttattccacggtagctctcacaccagcgggccagttattaaaagctgtttaatttttcctagaaaactccactacagaatgacttttagaagaaaaatttcaacaaatcctgaagtctttctgtgaagtgaccagttctgaactttgaagataaataattgctgtaaattccttttgattttctttttccaggttcatggtccttggtaatttcattcatggaaaaaaatcttattataataacaacaaagatttgtatatttttgactttatatttcctgagctctcctgactttgtgaaaaagggtggatgaaaatgcattccgaatctgtgagggcccaaaacagaatttaggggtgggtgaaagcacttgtgctttagctttttcatattaaatatatattatatttaaacattcatggcatagatgatgatttacagacaatttaaaagttcaagtctgtactgttacagtttgagaattgtagataacatcatacataagtcatttagtaacagcctttgtgaaatgaacttgtttactattggagataaccacacttaataaagaagagacagtgaaagtaccatcataattaacctaaatttttgttatagcagagtttcttgtttaaaaaaaaataaaatcatctgaaaagcaaaaa

SEQ ID NO: 88 - DNA, 3041 bp, Homo sapiens
ggcagcaggtcggtaggcgggaaatggcgactggctgaaggagctggttctgttgctgctgcggggtaagcgggaaagacaccacacattgcgcagtcgggaccatcgccggagcctgaggacacttctctgtcgtcacagttagttttacatgtggcacccataaaagatgaggctgagaacacggaaagcttctcagcagtcaaatcaaatccaaacacaacgcactgccagagcaaagaggaaatattcagaggttgatgatagtctgccttcaggaggagaaaaaccatcgaagaatgaaaccggcttgttgtcttcaattaaaaaatttattaaaggaagcacacctaaggaagagagagaaaatccttcaaaacggagtagaattgaacgtgatatagataacaatttgatcacgtcaacaccaagagcaggagaaaaacctaacaaacagatatctcgagtaagacggaaaagtcaagtaatggagaagcttggtagttatgaaatgacaaatcaacatgtaaaacaaaatggaaaattagaagataatccttcctctggcagtcctccaaggactactttgttggggaccatattttcacctgtcttcaactttttttcaccagcaaataaaaatggaacgtcaggatcagattctccaggacaggctgtggaagctgaagaaatagtaaaacaacttgatatggaacaggtggatgagatcactaccagtactactacatcaactaatggagcagcttactcaaatcaagcagttcaagtgagaccatcactaaacaatggtttagaagaagcagaagaaacagttaatcgtgatatcccaccccttacagcaccagtaactccagatagtggttattcatcagcccacgcggaggccacctatgaagaagactgggaagtatttgacccctattatttcatcaaacatgtcccgccactgacagaagaacaactaaataggaaacctgctcttccgttgaaaacaagaagcacaccggaattctccctagttttagacttggatgaaacactagtgcattgtagtctaaatgagctagaagatgcagcacttacttttccagtccttttccaagatgtcatttatcaggtttatgtgagattaagaccatttttcagggaattcctggaacgaatgtctcagatgtatgagatcattctttttactgcttctaagaaggtgtatgcagacaagttactgaacatactagaccctaaaaagcaactggtcaggcaccggcttttccgtgaacattgtgtttgtgtacaaggaaactatataaaggacttaaatattcttggaagagatctttcaaaaactataataattgacaactcaccacaagcctttgcatatcagctttctaatggaatccctatagaaagttggtttatggataaaaatgacaatgaactcctaaaattgattccattcctggagaagcttgtagaactgaatgaagatgttcgaccacacatcagagacagatttcgcttgcatgatttgctgcccccagattaagtaccaagacttgtcaaatcactgaagggggagagaatgctggacccttttgactaagacaaaacattgccatactggtgaaatttgcattttgtaccccgtcttgctttttcttatcttttggtgcccattattaattaagggtacagaaaggagactttatctatctcagatcgaatacatatagtaggtaggcttaaacagaagagtctttagaactaggcaactccagtgaaattttttatgacaggacatctgcagtttataaagaattctgtttctgccaccagcagtttgacctgtagtcacacaggattttatgataataacagagatgaaaatggacttttattttctctctgtttggtgctctaagtgggtttgtagccacttttctgttactttatgattctcatttcaacaggaatggccagtaaaagttgttttatttttcctgttaaggtttataacctttttacatttttgacctgtattagattagaatttcattatgcattccttttagttgaggcgcttcatagttttctggagatagtcaatttttagttttttattatacatttgaatggccgttttcctgctttgtctgcctgcacattgtatatttgtttaaaaatattctctacttttagtctatgtaagtttcatttagaaagacatgcatttatattttgtttctgtaatattctactgtaggtgaaatcttttcaaaaatcaagagactgggtagataagaatatatgaatgactaatatacaaaagatttaaaccattgtgatggcgtatatctcaaatggtaatatcttgcaatggcacacagatttaatggataaaggtatacctcagacttcactgtgctcacaatctttgaggagaaagtttggtcacctgtttggcttgatttagttactgctgcctttggttttctccaggaatgaagtattcagcacagtgactcagtattttctagttattttgcatgggctggtagtacctctgttatgctctcagttacaatcaatttaaaactgtataacagtcttggtacctaacagtagctatgcataatcctgtggcgcagtacactcccaagccaccaatgcagttaatatgctctcatagtggtttttctatgctatatgaaaatagtcttcaagccttggttctctaatgcagctaccacaagaggttgatatttttatagtggcgtgtaatctccttttcgggaggctttttatggaaggtagaatttgtaaaagttcgtatgctttgcctctcaactgcattaaccagtcacaggctcagactgtttttgtgtaaaggatgtcaaagaacggcactttttctaaagagaagtttgatattttgtatgcttgttaagaaagtacagtattggaaattaaaggtggacaactgataaaaaaaaaaaaaaaaaaaaaaaaaaaaaaaa

SEQ ID NO: 89 - DNA, 2309 bp, Homo sapiens
tttggccttatagcagttatccatggccgtactgtagtaaagttccttagaactttgccaggagtgaactagaaaaaagtgcttactagggcctaagagttgctttgtgccgtgtagtctggcctttgcactagtagatcattgctgacataggtcagtttagagacctttctgtgttaatgcctcctggtactgtcttaagatacgtacagtgtctgtttttagatctatgcatatgtcatgaagctccttgtgggctctgcatgaagctgctgctttgtttttgggttaacagatgtgcctgtcaactagcatgtgtattgtccaaattccataaacttaaggtttttaagggctgtgtggtttctgagctctatgtgtctttcctatccttgtaccttcaaagggtgagaaatgagatttatacatccaaagttagtctgataaatatggctttttgtttctccatgtaacctagactgtcaaaaataagtgatggtgataagtaggcctggagcctcagcttctgtaaatctcattcctaaaattttgctagactcgtgttggcaaaaacaaatacctgtggattgtccttaaggcttttaatcagatacctgtgttgctgttagctgaactgtagtgaagcatcgatccaaatcggtcttctgaagtatcagttatgcttttgagtttagaaaatacttaggtgttagtctagtcttcccattcatgaatcagtgtatgtccatatcagagagcctcaacttcttttttcttcctttttaaaaatgattttagtgttttgatttagtgtatactacatagttcagtattattggctttaccagtgttgacagaaaaattttaaatctccagttgcaaacagcaatggattaggatatggaaataaaatcatggtgacatcactgctgagttatcttaaacctctgctacttaattctccatattgaaatgcatactcctccacatacatggcttccaagtaaaggcaattgtagaggggccctgtctatcccagtatggttggattttaaacatatctgtgtttccgttattttgggaactgattaatatttacaattttttttgtttatgagttattttgatactaagaaaagagagaatctagaacatcttgaagttgaaatacaaattttattcttttggtcttgggagaatttaagcagtctatgcaactcatcaaatggtgagaaatagccctccgaggttccagtaagctttcagtgactttgatacctccccaagtttcttgagttgctgcttgtcaacacccagcttttaactgagtgtttgctcctgatggtttaggagattttcatgttgtatcacactgtcaagttttattttgtctttttatccctccgtggatgtgagtttgaaacaagcacggtacagtaatcctgcctgatagagtagtctggaatgagaattactttttgggtgagagagttctccattttaatgtttctaaagtttttcatatgaacttggcattggaaaagggaggtaaagaaaaaggacgtttactaaaagcagtgtctactcttcccctttgtgagtgtttattcatggctaatgaaaaaaagagaaggactcttgggttttgtgttgccatgttaagcatggagagggatgcttgacagcatgctaattgaagccagagcaagtatgtccttcatcaggtaatcaggaactcttcagttgaagctgaggaactaactgattagttgttgatcataatataattggttacaaagtggaagtgccagctggcttaagtacccaaagaaaagaatgcagcagcctaacttagtgttaccatatgttactgaatttgaaactgaccttttttcccaccctacttcacacacctaaaactcttttcttgtcagaccaaagagcgaaaagaaaaaaaaaaagtaaaacactttaccaatctgtcactcaggtacaattttgtggtgagatttttgtctgttctctttgtattgctcttaagagtcctttctcagcatattattctgccattgcctctgtcttccttggggcacctcagctctggatgctacccctgggatatctactgctgttatgtgaatgataggaggtaagtgaccattatagtaagggctctttgtaaaaaaattcaaaaaatttaaaaaggatgtatacattttatagtctggctatcagtttgatatcttgctgtcaagtatgtttctcaatctgtatttatccatcccatcaataaatgttaatggtaaaac

SEQ ID NO: 90 - DNA, 2670 bp, Homo sapiens
ggccgagccggaagaccctctctttcgctgtttgagagtctctcggctcaaggaccgggaggtaagaggtttgggactgccccggcaactccagggtgtctggtccacgacctatcctaggcgccatgggtgtgataggtatacagctggttgttaccatggtgatggccagtgtcatgcagaagattatacctcactattctcttgctcgatggctactctgtaatggcagtttgaggtggtatcaacatcctacagaagaagaattaagaattcttgcagggaaacaacaaaaagggaaaaccaaaaaagataggaaatataatggtcacattgaaagtaagccattaaccattccaaaggatattgaccttcatctagaaacaaagtcagttacagaagtggatactttagcattgcattactttccagaataccagtggctggtggatttcacagtggctgctacagttgtgtatctagtaactgaagtctactacaattttatgaagcctacacaggaaatgaatatcagcttagtctggtgcctacttgttttgtcttttgcaatcaaagttctattttcattaactacacactattttaaagtagaagatggtggtgaaagatctgtttgtgtcacctttggattttttttctttgtcaaagcaatggcagtgttgattgtaacagaaaattatctggaatttggacttgaaacagggtttacaaatttttcagacagtgcgatgcagtttcttgaaaagcaaggtttagaatctcagagtcctgtttcaaaacttactttcaaatttttcctggctattttctgttcattcattggggcttttttgacatttcctggattacgactggctcaaatgcatctggatgccctgaatttggcaacagaaaaaattacacaaactttacttcatatcaacttcttggcacctttatttatggttttgctctgggtaaaaccaatcaccaaagactacattatgaacccaccactgggcaaagaaagtatccctttaatgacagaagccacattcgatactctgcgactctggttaataatcctgctgtgtgctttgcggttggccatgatgcgtagtcacctgcaagcttatttaaatttagcccaaaaatgtgtggatcagatgaagaaagaagcggggcgaataagcacggttgagctacagaaaatggtggctcgagtcttttattatctttgtgtcattgcactgcagtatgtggcgcctctggtaatgctgcttcacacaactctgcttttgaaaacactaggtaatcattcctggggtatttatccagaatctatctctaccttaccagtggataatagtctactgtccaattctgtttactctgaattaccatcagctgaagggaaaatgaaggtaactgttacacaaataacagtggcactgagcagcttaaaaaatatttttactcctcttctttttcgaggacttctgtcttttctgacctggtggattgctgcttgcctcttttctacaagcctttttgggcttttctatcaccagtatctgactgtggcatgaatctcagttaacaaaaaagcatatccaaatcaccctttaaattaaaatatctgtgcccttaaagggctgatgaaaaccagaagaaagcaaatacaatgggaaaaaaaaacatatcagaatgtcttgtattaaatgtttcctctgtattctcagggtgaattaatgtagtaatatttaaaattacaaaatagattgttaactgttacactgtggcattggaattttaactctttgtatttactggtatgagagggctatctacaagggtaatatttctgattaccctggtttacagaaacctccagcagtctttgaaacatctcacatgactctagttattgattgcttttaatggttttatggtactgttgatagtcatagtggctgcctatagaacaatcttcaaactgagccatgctttaggggagggaaaggggctaaagtctcttctgttggtaatttattagttactcttgaaacagtaaaatccaacagaaaggaagagatagctactgtatattacagtaaagaaagctgcatagttattttaaatttaatggagatgaatatggttaaaatatataactactgctgcttgagaatagcaagagtattgttttaaaacatattccacccaacttgagagttcttttaaaatgattggccatatgaacatttgtaatcttgccattaggtttggacctgccatattttgttttattctgtgatcctaactagttccttttaataggctaaaatatttatcaatactgatcagactttaaagaaattactttgtaaacctgctgactacctgtatgtattgtatatatattatatattaaatatataatatattgagattataaaagatgaaaatattgaatccttataatattttaagttgcagaatgtatgttaaaaagtgacttgaatgagatgtatttgtatctagaaattttatttctttttggaatgagattaaaatacattttgaaagttaaaaaaaaaaaaaaaaaaaaaaaaaaaaaaaaaaaaaaaaaaaaaaaaaaaaaaaaaaaaaaccaaaaaaaaaaaaaaa

SEQ ID NO: 91 - DNA, 2336 bp, Homo sapiens
cttttcttccgcacggttggaggaggtcggctggttatcgggagttggagggctgaggtcgggagggtggtgtgtacagagctctaggactcacgcaccaggccagtcgcggattttgggccgaggcctgggttacaagcagcaagtgcgcggttggggccactgcgaggccgttttagaaaactgtttaaaacaaagagcaattgatggataaatcaggaatagattctcttgaccatgtgacatctgatgctgtggaacttgcaaatcgaagtgataactcttctgatagcagcttatttaaaactcagtgtatcccttactcacctaaaggggagaaaagaaaccccattcgaaaatttgttcgtacacctgaaagtgttcacgcaagtgattcatcaagtgactcatcttttgaaccaataccattgactataaaagctatttttgaaagattcaagaacaggaaaaagagatataaaaaaaagaaaaagaggaggtaccagccaacaggaagaccacggggaagaccagaaggaaggagaaatcctatatactcactaatagataagaagaaacaatttagaagcagaggatctggcttcccatttttagaatcagagaatgaaaaaaacgcaccttggagaaaaattttaacgtttgagcaagctgttgcaagaggattttttaactatattgaaaagctgaagtatgaacaccacctgaaagaatcattgaagcaaatgaatgttggtgaagatttagaaaatgaagattttgacagtcgtagatacaaatttttggatgatgatggatccatttctcctattgaggagtcaacagcagaggatgaggatgcaacacatcttgaagataacgaatgtgatatcaaattggcaggggatagtttcatagtaagttctgaattccctgtaagactgagtgtatacttagaagaagaggatattactgaagaagctgctttgtctaaaaagagagctacaaaagccaaaaatactggacagagaggcctgaaaatgtgacaggatcatgaatgtcaaaggcttttatcttgagaacatggtgtctggagttaaaggtattggcatactccacacatctgtaccattcttgagtgatcgcttaggaatgaatgtgatttgaactcattcatgttgagagggtgtcaaattgagaaccaggtagatccccaccacctacagtaaaaaggaccctaaagtaaattggttgaagaaattagatcccaaagattcttggtgaattttgaagtcttcatcagtatatccatattaaaacgagatgacagaagccaaagtaattatggcaagtaatggtttttatcttaactataagttatttgctcaagggtgtaatggtcattaccaaggcttttagaatgcagtttctcatttgctgtggacatgaccataaaaaaaaatttcccagtaggttttctatctgctacgttgctagcaatcagcttattgggaacagttgattaactgtaatagaaatgcaatacaaataaaatgtgaaccacatgtgatttttctttaaaatcagtgagatttgaaaattctcctagatctcttgaatcatgcaaatttgctttgcctttatattgtaacccttgtgggttgctaataaccaagcagtttgtagtagagttaactcaggctcgttctagggactcattcatgttcactcactgtacactcatctctggaaatgtaaaatttacttttatactattgttatgtagggctgacaggacaactggatcagtttcattaaaaaggtatgtatgcattagaaaagacatttgtatgggtcatttcaaagagggcttatgaggctgtgaaacccagagctcttaacgctgtgaccaaagatggaagttctctataggaagccatagcactcctaatgtttggtgctatgttttcctgaggagatataaaacgtaataatccatgattgttgccatgtgagagttttaaaggttaatcaaaatttctcttcttcagggcaaacttgaagataaatcttttgactccagctctttagaggatctaaagtgaccttgatggacagtggaagaaatcacaacatggaattcctcgaataacaatttattgactttaaataattttgtctaatgctacatatacacaattaaaaaacctttacactatttctagaaagtcagcatgtatttttggctcgaagtttctctagtgttttctgtggaaggaataaaaatttgagtttcaaaaaaaaaaaaaaaaaaaaaaaaaaaaaaaaaaaaaaaaaaa

SEQ ID NO: 92 - DNA, 5662 bp, Homo sapiens
agcgggttgtgactgaaacccgtcaatatggcggcgatcggccgcggccgctctctgaagaacctccgagtacgagggcggaatgacagcggcgaggagaacgtcccgctggatctgacccgagaaccttctgataacttaagagagattctccaaaatgtggccagattgcagggagtatcaaatatgagaaagctaggccatctgaataactttactaagcttctttgtgatattggccacagtgaagaaaaactgggctttcactatgaggatatcataatttgtttgcggttagctttattaaatgaagcaaaagaagtgcgagcagcagggctacgagcgcttcgatatctcatccaagactccagtattctccagaaggtgctaaaattgaaagtggactatttaatagctaggtgcattgacatacaacagagcaacgaggtagagaggacacaagcacttcgattagtcagaaagatgattactgtgaatgcttccttgtttcctagttctgtgaccaactcattaattgcagttggaaatgatggacttcaagaaagagacagaatggtccgagcatgcattgccattatctgtgaactagcacttcagaatccagaggtggtggcccttcgaggaggactaaacaccatattgaaaaatgtgattgattgccaattaagtcgaataaatgaggccctaattactacaattttgcaccttcttaatcatccaaagactcggcagtatgtgcgagctgatgtagaattagagagaattttagcaccctatactgattttcactacagacatagtccagatacagctgaaggacagctcaaagaagacagagaagcacgatttctagccagtaaaatgggaatcatagcaacattccgatcatgggcaggtattattaatttatgtaaacctggaaattctgggatccagtctctaataggagtactttgcataccaaatatggaaataaggcgaggtctacttgaagtgctttatgatatatttcgtcttcctctacctgttgtgactgaggagttcatagaagcactactcagtgtagatccagggaggttccaagacagttggaggctttcagatggctttgtggcagctgaggcaaaaactattcttcctcatcgtgccagatccaggccagacctcatggataattatttggcactgatactctctgcatttattcgtaatggacttttagagggtctagttgaagtgataacaaacagtgatgatcatatctcagttagagctaccatccttttaggagagcttttacatatggcaaacacaattcttcctcattcacatagccatcatttacactgcttgccaaccctaatgaatatggctgcatcctttgatatccccaaggaaaagagactgcgagccagtgcagccttgaactgtttaaaacgcttccatgaaatgaagaaacgaggacctaagccttatagtcttcatttagaccacattattcagaaagcaattgcaacacaccagaaacgggatcagtatctccgagttcagaaagatatatttatccttaaggatacagaggaagctcttttaattaaccttagagatagccaagtccttcaacataaagagaatcttgaatggaattggaatcttatagggaccattcttaagtggccaaatgtaaatctaagaaactataaagatgaacagttacacaggtttgtacgaagactactttatttttacaagcccagcagtaaattatatgccaacctggatctggattttgccaaggccaaacagctcacggttgtaggttgccagtttacagaatttcttcttgaatctgaagaggatgggcaaggctacttagaagatctagtaaaggatattgttcagtggctcaatgcttcatctggaatgaaacccgaaagaagtcttcaaaataatggtttattgaccacccttagtcaacactactttttatttattggaacactttcttgccaccctcatggagttaaaatgctggaaaaatgcagtgtatttcagtgtctccttaatctttgctccttgaaaaaccaagatcacttgctaaaacttactgtttctagcttggactatagcagagatggattggctagagtcatcctttccaaaattttaactgcagctactgatgcctgcagactctatgcaacaaaacatttaagggtattattgagagctaatgttgaattctttaataattggggaattgagttgttagtgacccagctacatgataaaaacaaaacgatttcctctgaagctcttgatatcctcgatgaagcatgtgaagacaaggccaatcttcatgctctcattcagatgaaaccagcgttatcccaccttggagacaagggtttgcttctcctgctgagatttctctccattccaaaaggattttcctatctgaatgaaagaggttatgtagcaaaacaattggaaaagtggcacagggaatacaactccaaatatgttgacttgattgaggaacaactcaatgaagcacttactacttaccggaagcctgttgatggtgataactatgttcgtcggagtaaccaaagattacagcgtcctcacgtctacctgcctatacacctttatggacaactagtacaccataaaacaggctgccatttgttggaagtacagaatattattacagaactctgtcgtaatgttcgtacaccagatttggataagtgggaagaaattaaaaaactgaaagcatctctttgggccttgggaaatatcggctcatcaaattggggtctcaatttgctacaggaagaaaacgtgattccagatatactaaaacttgcaaaacagtgtgaagttctttccatcagagggacctgtgtatatgtacttgggctcatagctaaaaccaaacaaggctgtgatattctaaaatgtcacaactgggatgctgtgaggcatagtcgcaaacatctgtggccagtggttccagatgatgtggaacaactctgtaatgaactttcatctatcccaagcactctaagtttgaactcggagtcaaccagctctagacataatagtgaaagtgaatctgtgccatcgagtatgttcatattggaggatgaccggtttggcagcagctctactagtacatttttccttgatatcaatgaagatacagagccaacattttatgaccgatctggacccataaaggataaaaattcattccctttctttgcttctagtaaacttgtgaagaatcgtatcttaaattcgcttactttgcctaacaaaaaacatcgtagtagcagtgatccaaaaggagggaaattatcatctgaaagtaagacaagcaacaggcgaatcagaacacttacggagcccagtgttgattttaatcatagtgatgattttacacccatatccactgtacagaaaacattacaattagagacttcatttatggggaataagcacattgaagacactggtagtacaccaagcattggagaaaatgacttaaaattcaccaagaattttggtacagagaatcacagagaaaatacaagccgagagaggttagtagtagaaagttcaacgagctcacatatgaagatacgtagccaaagtttcaatacagacactacaacaagtggcataagttcaatgagctcaagtccttcacgagagacagtaggtgtagatgctacaactatggacacagactgtggaagcatgagtactgtggtaagtactaaaactattaagacaagccactatttgacgccacagtctaaccatctgtctctctccaaatcaaattcggtgtccctggtgcctccaggttcttctcatacgcttcctagaagagcacagtcccttaaagcaccctctattgctacaattaaaagtctagcagattgtaactttagttacacaagttctagagatgcttttggctatgctacactgaaaagactacagcaacaaagaatgcatccatccttatctcactctgaagctttggcatctccagcaaaagatgtgctatttactgataccatcaccatgaaggccaacagttttgagtccagattaacaccaagcaggttcatgaaagccttaagttatgcatcattagataaagaagatttattgagtcctattaatcaaaataccctgcaacgatcttcctcagtgcggtccatggtgtccagtgccacatatgggggttcagatgattacattggtcttgctctcccggtggatataaatgatatattccaggtaaaggatattccctattttcagacaaaaaacataccaccacatgatgatcgaggtgcaagagcatttgcccatgatgcaggaggtcttccatctggaactggaggtcttgtaaaaaattcttttcacttgctacgacagcagatgagtcttacggaaataatgaattcaatccattcagatgcctctctgtttttagaaagtacagaagacactggactacaggaacatacagatgataactgcctttattgtgtctgtattgaaattctgggtttccagcccagcaaccaactgagtgcaatatgtagtcattcagactttcaagatattccatattctgattggtgtgagcagactatccataatcctttagaagtggttccctctaagttttcggggatttctggatgcagtgatggggtgtctcaagaaggctcagctagcagcaccaaaagcacagaattgttactaggtgttaaaacaattccagatgatacaccaatgtgccgtatactccttcgcaaagaagttctaagattagtcattaatttgagtagttcagtttcaactaaatgtcatgagactgggcttttaacaattaaggagaagtatcctcaaacatttgatgacatatgcctttactctgaggtttcccatttgctgtcacactgcacattcagacttccgtgtcggaggttcatacaagaattatttcaagatgtacagtttctacaaatgcatgaagaagcagaggctgtgttggcaacaccaccaaagcaacctatagttgatacatctgctgaatcctgacctcatatttatgatggatatagatacatactatatatattcatatttgtggatttcctaaaagcctcagaaaatacgactgactaggcagcaaagacaggagtatcttctgtacactgttccgcagttactggtacatgaacagttggaactgctgactttcctaaccaaaacaacttccttctctcctttgttgagccttttgaggggttcatgattcattaccacagttttaagagtttcagttaccattgtatgcaagagccaagcactgaatacctacataggttttctattttctttcattttaaaagcgtaatgacagtggaacaataatgggatatgcagaagcacccttcacaagttatttctgaatgattttagggtaaataatacagatgccttgtatgttaactaacttgtggaaagcaggaatcagtgtctctaaggctgcatcctattaccacaatggggttgtgctataactggctggtattagagagggaac

SEQ ID NO: 93 - DNA, 5128 bp, Homo sapiens
gcgggcggtgctggagcgccaagtggcgctggagaaccggcgcttcctttcgccgcttccgccgccatctccgcgtttgtggggcgggaaagagggagggggctagcggctgcagctggagcgggcttctctccggggacggtcctttcctccctgctctccttttccttctttccgcgttgccgccgcccgccccctgcgcctccccgcggagcctgggtccgggagggggaaggtaggggcggcggggggcgggagagtctggcgagcggacgctagctctgaggaaactcatcaatccgtgagccccggagtccggggtgcacatcggcccagccgcagcgtcggcggcggcggcggcagcagcacgaaggggctcagtcggggtaggcgggggcggtgccggtgccgcgggggcgggcccgaccgtcccgcccagaagttgtagggcttggctcctcgcgatcttgttcctttcccctccgcttctctgacctagctgcgcggccccggcccgggagctgccgaacccgcgcctcccctgggtgaggaggacacgcctgccctcgtcgagaaaacttttcctgccgactcagttggggcggcggtggcaggaagtgcgggcagcgacctctcctccgcctgccccgcgcgccctgccggaggtcggcgctgagcttgcgatcaagtttgtgggggccccccttcccagttgccggcgagtctcgcctcgagaggggcgcccgaccccggggagggcggcaggccagggcgaaggccaagggcgtgtggtggcgccggagactaggtgcggagcaaggcggggactcgcacccgcatccgagagcgcggaggtcgcgcagcccgggagaagggagcctccggcggctgcttcctagagtccacagtgcgctgtctcctttggctgaggagagtgtcctggccccgagtctatcgaggaaaatgaagttaagccgccagttcaccgtgttcggcagtgcgatcttctgtgtggtgattttctcgctctacctgatgctggaccggggtcacttagactaccccaggaacccgcgccgcgagggctccttccctcagggccagctctcaatgttgcaagaaaaaatagaccatttggagcgtttgctagctgagaataatgagatcatctcaaatattagagactcagtcatcaatttgagtgagtctgtggaggatggtccgaaaagttcacaaagcaatttcagccaaggtgctggctcacatcttctgccctcacaattatccctctcagttgacactgcagactgtctgtttgcttcacaaagtggaagtcacaattcagatgtgcagatgttggatgtttacagtctaatttcttttgacaatccagatggtggagtttggaagcaaggatttgacattacttatgaatctaatgaatgggacactgaaccccttcaagtctttgtggtgcctcattcccataacgacccaggttggttgaagactttcaatgactactttagagacaagactcagtatatttttaataacatggtcctaaagctgaaagaagactcacggaggaagtttatttggtctgagatctcttacctttcaaagtggtgggatattatagatattcagaagaaggatgctgttaaaagtttaatagaaaatggtcagcttgaaattgtgacaggtggctgggttatgcctgatgaagctactccacattattttgccttaattgatcaactaattgaaggacatcagtggctggaaaataatataggagtgaaacctcggtccggctgggctattgatccctttggacactcaccaacaatggcttatcttctaaaccgtgctggactttctcacatgcttatccagagagttcattatgcagttaaaaaacactttgcactgcataaaacattggagtttttttggagacagaattgggatctgggatctgtcacagatattttatgccacatgatgcccttctacagctatgacatccctcacacttgtggacctgatcctaaaatatgctgccagtttgattttaaacgtcttcctggaggcagatttggttgtccctggggagtccccccagaaacaatacatcctggaaatgtccaaagcagggctcggatgctactagatcagtaccgaaagaagtcaaagctttttcgtaccaaagttctcctggctccactaggagatgatttccgctactgtgaatacacggaatgggatttacagtttaagaattatcagcagctttttgattatatgaattctcagtccaagtttaaagttaagatacagtttggaactttatcagatttttttgatgcgctggataaagcagatgaaactcagagagacaagggccaatcgatgttccctgttttaagtggagattttttcacttatgccgatcgagatgatcattactggagtggctattttacatccagacccttttacaaacgaatggacagaatcatggaatctcatttaagggctgctgaaattctttactatttcgccctgagacaagctcacaaatacaagataaataaatttctctcatcatcactttacacggcactgacagaagccagaaggaatttgggactgtttcaacatcatgatgctatcacaggaactgcaaaagactgggtggttgtggattatggtaccagactttttcattcgttaatggttttggagaagataattggaaattctgcatttcttcttattttgaaggacaaactcacatacgactcttactctcctgataccttcctggagatggatttgaaacaaaaatcacaagattctctgccacaaaaaaatataataaggctgagtgcggagccaaggtaccttgtggtctataatcctttagaacaagaccgaatctcgttggtctcagtctatgtgagttccccgacagtgcaagtgttctctgcttcaggaaaacctgtggaagttcaagtcagcgcagtttgggatacagcaaatactatttcagaaacagcctatgagatctcttttcgagcacatataccgccattgggactgaaagtgtataagattttggaatcagcaagttcaaattcacatttagctgattatgtcttgtataagaataaagtagaagatagcggaattttcaccataaagaatatgataaatactgaagaaggtataacactagagaactcctttgttttacttcggtttgatcaaactggacttatgaagcaaatgatgactaaagaagatggtaaacaccatgaagtaaatgtgcaattttcatggtatggaaccacaattaaaagagacaaaagtggtgcctacctcttcttacctgatggtaatgccaagccttatgtttacacaacaccgccctttgtcagagtgacacatggaaggatttattcggaagtgacttgcttttttgaccatgttactcatagagtccgactataccacatacagggaatagaaggacagtctgtggaagtttccaatattgtggacatccgaaaagtatataaccgtgagattgcaatgaaaatttcttctgatataaaaagccaaaatagattttatactgacctaaatgggtaccagattcaacctagaatgacactgagcaaattgcctcttcaagcaaatgtctatcccatgaccacaatggcctatatccaggatgccaaacatcgtttgacactgctctctgctcagtcattaggggtttcgagtttgaatagtggtcagattgaagttatcatggatcgaagactcatgcaagatgataatcgtggccttgagcaaggtatccaggataacaagattacagctaatctatttcgaatactactagaaaaaagaagtgctgttaatacggaagaagaaaagaagtcggtcagttatccttctctccttagccacataacttcttctctcatgaatcatccagtcattccaatggcaaataagttctcctcacctacccttgagctgcaaggtgaattctctccattacagtcatctttgccttgtgacattcatctggttaatttgagaacaatacagtcaaaggtgggcaatgggcactccaatgaggcagccttgatcctccacagaaaagggtttgattgtcggttctctagcaaaggcacagggctgttttgttctactactcagggaaagatattggtacagaaacttttaaacaagtttattgtcgaaagtctcacaccttcatcactatccttgatgcattcacctcccggcactcagaatataagtgagatcaacttgagtccaatggaaatcagcacattccgaatccagttgaggtgaacctgactttcacatttggattgagaatcattggcttttatacctttcttggtttgacgtgcaataaagaagcacattattttagcttctggctactgtgagaacatgaattctgtgattctgtgggttttttcttttttcttttaccagtacagtaagaaaaaaaaaaaaaaaaaaaaagccatgctatcaatcaagattctttttttttaaactttctcccatgaactaccaccatcagtatgaattgatgcaacaaatgaagaaatatttaaagacagcctctcaacagattgtatctcaggttaaatgctaactaattatgtctgtgttgggggttgcgaagagattcttaaaagtatctgtgtgttgatcatcagttttacaaaaacacctatttggctgaaatggaataaaatgtttgtgggtaaaagctaatggccaaaatggttgcaatcattcatactagttagaaaaattatgtgttgaaataagtggaaaagtgcaatccatccacccttatgattaacgtagatgatttttatacctttttctgatgtacctcttgaccttctccttcccttcctaccctttctaagtatttccagaaatacctgattttgaatcattcaacagtagaaaaagaggcatattttcattacttgacaatgtgggatgggtgcaatttattccatcttcactaaaatagaagcaattccataggtaccat

SEQ ID NO: 94 - DNA, 2192 bp, Homo sapiens
cggcacgagctaggatctgtgactgccacccctccccccacccgggctcggcgggggagcgactcatggagctgccgtaagttttaccaacagactgcagtttcttcactaccaaaatgacatcattttccacctctgctcagtgttcaacatctgacagtgcttgcaggatctctcctggacaaatcaatcaggtacgaccaaaactgccgcttttgaagattttgcatgcagcaggtgcgcaaggtgaaatgttcactgttaaagaggtcatgcactatttaggtcagtacataatggtgaagcaactttatgatcagcaggagcagcatatggtatattgtggtggagatcttttgggagaactactgggacgtcagagcttctccgtaaagaacccaagccctctctatgatatgctaagaaagaatcttgtcactttagccactgctactacagatgctgctcagactctcgctctcgcacaggatcacagtatggatattccaagtcaagaccaactgaagcaaagtgcagaggaaagttccacttccagaaaaagaactacagaagacgatatccccacactgcctacctcagagcataaatgcatacattctagagaagatgaagacttaattgaaaatttagcccaagatgaaacatctaggctggaccttggatttgaggagtgggatgtagctggcctgccttggtggtttttaggaaacttgagaagcaactatacacctagaagtaatggctcaactgatttacagacaaatcaggatgtgggtactgccattgtttcagatactacagatgacttgtggtttttgaatgagtcagtatcagagcagttaggtgttggaataaaagttgaagctgctgatactgaacaaacaagtgaagaagtagggaaagtaagtgacaaaaaggtgattgaagtgggaaaaaatgatgacctggaggactctaagtccttaagtgatgataccgatgtagaggttacctctgaggatgagtggcagtgtactgaatgcaagaaatttaactctccaagcaagaggtactgttttcgttgttgggccttgaggaaggattggtattcagattgttcaaagttaacccattctctctccacgtctgatatcactgccatacctgaaaaggaaaatgaaggaaatgatgtccctgattgtcgaagaaccatttcggctcctgtcgttagacctaaagatgcgtatataaagaaagaaaactccaaactttttgatccctgcaactcagtggaattcttggatttggctcacagttctgaaagccaagagaccatctcaagcatgggagaacagttagataacctttctgaacagagaacagatacagaaaacatggaggattgccagaatctcttgaagccatgtagcttatgtgagaaaagaccacgagacgggaacattattcatggaaggacgggccatcttgtcacttgttttcactgtgccagaagactaaagaaggctggggcttcatgccctatttgcaagaaagagattcagctggttattaaggtttttatagcataatggtagtacgaacataaaaatgcatttattcagttcacttaccacattatttgaaaatcaatcctttatttaattttatttccaacctgtcagagaatgttcttaggcatcaaaatccaaggtagctgtaagaaaaatactggagctaacaatgaagaacagaagtaatctgattagtcaaattattaagtgccatggattactttatgcagcagtcaggtacatagttaggtgaacccaaaagaaaaactcttgaaaacaagagatttcttccatgcacatttacaatattgaggtataattaacatgataaagtgtttccttctaacgagttgtagaaatctgagtaaccacccaaaaaagcaatagaatgtttgtgtcaccccaaaacactcccttctgcccctcttcagacagtccttcagctatttcatggctctcaccctagtttttttttttttttgcacttttttttttccgggggtataggggaggtgtggggcgacagggtctgtcttgttctgtctcccaggctgaagtgcagtgagtcaagattgagccactgcactccagcctgggtgacagcgcgagactccatctcag

SEQ ID NO: 95 - DNA, 2302 bp, Homo sapiens
ggagagaccacactgccatgcctccctctgggccccgaggaaccctccttctgttgccgctgctgctgctgctcctgcttcgcgccgtgctggctgtccccctggagcgaggggcgcccaacaaggaggagacccctgcgactgagagtcccgacacaggcctgtactaccaccggtacctccaggaggtcatcgatgtactggagacggatgggcatttccgagagaagctgcaggctgccaatgcggaggacatcaagagcgggaagctgagccgagagctggactttgtcagccaccacgtccgcaccaagctggatgagctcaagcgacaggaggtgtcacggctgcggatgctgctcaaggccaagatggacgccgagcaggatcccaatgtacaggtggatcatctgaatctcctgaaacagtttgaacacctggaccctcagaaccagcatacattcgaggcccgcgacctggagctgctgatccagacggccacccgggaccttgcccagtacgacgcagcccatcatgaagagttcaagcgctacgagatgcttaaggaacacgagagacggcgttatctggagtcactgggagaggagcagagaaaggaggcggagaggaagctggaagagcaacagcgccggcaccgcgagcaccctaaagtcaacgtgcctggcagccaagcccagttgaaggaggtgtgggaggagctggatggactggaccccaacaggtttaaccccaagaccttcttcatactgcatgatatcaacagtgatggtgtcctggatgagcaggagctggaggcactcttcaccaaggagctggagaaagtgtacgacccaaagaatgaggaggacgacatgcgggagatggaggaggagcgactgcgcatgcgggagcatgtgatgaagaatgtggacaccaaccaggaccgcctcgtgaccctggaggagttcctcgcatccactcagaggaaggagtttggggacaccggggagggctgggagacagtggagatgcaccctgcctacaccgaggaagagctgaggcgctttgaagaggagctggctgcccgggaggcagagctgaatgccaaggcccagcgcctcagccaggagacagaggctctagggcggtcccagggccgcctggaggcccagaagagagagctgcagcaggctgtgctgcacatggagcagcggaagcagcagcagcagcagcagcaaggccacaaggccccggctgcccaccctgaggggcagctcaagttccacccagacacagacgatgtacctgtcccagctccagccggtgaccagaaggaggtggacacttcagaaaagaaacttctcgagcggctccctgaggttgaggtgccccagcatctgtgatcctccgggaccccagccctcaggattcctgatgctccaaggcgactgatgggcgctggatgaagtggcacagtcagcttccctgggggccggtgtcatgttgggctcctggggcgggggcacggcctggcatttcacgcattgctgccaccccaggtccacctgtctccactttcacagcctccaagtctgtggctcttcccttctgtcctccgaggggcttgccttctctcgtgtccagtgaggtgctcagtgatcggcttaacttagagaagcccgccccctccccttctccgtctgtcccaagagggtctgctctgagcctgcgttcctaggtggctcggcctcagctgcctgggttgtggccgccctagcatcctgtatgcccacagctactggaatccccgctgctgctccgggccaagcttctggttgattaatgagggcatggggtggtccctcaagaccttcccctaccttttgtggaaccagtgatgcctcaaagacagtgtcccctccacagctgggtgccaggggcaggggatcctcagtatagccggtgaaccctgataccaggagcctgggcctccctgaacccctggcttccagccatctcatcgccagcctcctcctggacctcttggcccccagccccttccccacacagccccagaagggtcccagagctgaccccactccaggacctaggcccagcccctcagcctcatctggagcccctgaagaccagtcccacccacctttctggcctcatctgacactgctccgcatcctgctgtgtgtcctgttccatgttccggttccatccaaatacactttctggaacaaaaaaaaaaaaaaaaaaaaaaaaaaaaaaaaaaaaaaaaaaaaaaaaaaaaaaa

SEQ ID NO: 96 - DNA, 4079 bp, Homo sapiens
gccgctcggccgcgcgcgggtcggccggctctatggggaaagcggcggctccgagccgaggcggcggctgtggcggccgctcccgcgggctctcgtcgctgttcacggttgtcccctgcctgtcgtgccacacggcggcgccgggcatgagcgcttccacgtccggctccgggccggagcccaagccccagccccagcccgtgcccgaaccggagcggggaccgctgtcagaacaggtgtcggaggcagtttcggaggcagtgccaagatcggaacctgtgtccgagacgacgtctgagccggagccaggggctgggcagccatcggaactgctgcaggggtcgcggccggggtcagagtcaagctcaggtgtaggggctgggcccttcactaaggccgcatcggagccgctctcccgggcggtggggagcgcgacctttctcagacccgagtcaggatcgctgccagcgttaaagcccctgcctcttctgcgaccaggacaggcgaagactcctcttggggttccaatgtcggggactggcacgacctccagtgccccactggccttactgcctctggacagcttcgagggctggcttctcaagtggaccaactatctgaagggctaccagcgccgctggttcgtgctgggcaatggtttgctctcttactacagaaatcagggtgaaatggcccacacgtgccgtggaaccatcaacctgtccaccgcgcacattgacacggaggactcttgtggtatcttgctgaccagtggggccaggagctaccacctcaaggccagctcagaggtggaccggcagcagtggatcaccgccctggagctggccaaggccaaggctgtccgcgtgatgaacactcattcagatgactctggggacgacgacgaggctaccaccccagccgacaagagcgagctgcaccacaccctgaagaatctttccctgaagttagatgacctcagcacgtgcaatgacctcatcgccaagcacggcgctgcactccagcgctccctgacagagctggacggcctcaagatcccatctgagagtggggagaagctgaaggtggtgaatgagcgggccaccctcttccgcatcacatccaatgctatgatcaacgcctgcagggacttcttggaactagcagagatacacagtcggaaatggcagcgggcactgcagtatgagcaggagcagcgcgtgcacttggaggaaaccattgagcagctggcgaagcagcacaacagcctcgagcgggccttccacagtgcccctggccggccggccaacccctccaagagcttcattgagggaagcctcttgactcccaaaggagaggacagtgaggaagatgaagataccgagtactttgatgccatggaagactccacatccttcatcaccgtgatcaccgaggccaaggaagacagcagaaaagctgaaggtagcaccgggacaagttccgtggactggagctcagcagacaatgtactagatggtgcctcgctcgtgcccaagggttcatccaaagtcaagaggcgagtccgcattcccaacaagcccaactacagccttaacctctggagcatcatgaagaactgcatcggccgggagctctccaggatccccatgccggtgaacttcaatgagcccctgtccatgctccagcggctgacagaggacctggagtaccaccacctgctggacaaggcagtgcactgcaccagctcagtggagcagatgtgcctggtggccgccttctctgtgtcctcctactccaccacagtgcaccgcatcgccaagcccttcaaccccatgctgggggagaccttcgagctggaccgcctcgacgacatgggcctgcgctccctctgtgagcaggtgagccaccaccccccctcagctgcgcactacgtgttctccaagcatggctggagcctctggcaggagatcaccatctccagcaagttccggggaaaatacatctccatcatgccgctaggtgccatccacttagaattccaggccagtgggaatcactacgtgtggaggaagagcacctcaactgttcacaacatcatcgtgggcaagctctggatcgaccagtcaggggacatcgagattgtgaaccataagaccaatgaccggtgccagctgaagttcctgccctacagctacttctccaaagaggcagcccggaagggagaacgcggagaacatgtactacttctcagagctggccctgaccctcaacgagcacgaggagggcgtagcgccaaccgacagccgcctgcggcccgaccagcggctgatggagaagggccgttgggacgaggccaataccgagaagcagcggctggaggagaagcagcgcctgtcgcggcgccggcggctggaggcctgcgggccgggcagcagctgcagctcggaggaagagaaggaggcggatgcctacacgccactgtggtttgagaagaggctggatccgctgaccggggagatggcctgtgtgtacaagggcggctactgggaggccaaggagaagcaagactggcatatgtgccccaacatcttctgagcgccacccttgcaacaaatacaggcgcctgcacagcctggcccacctgttcattaatgcactcaatttagtactgaatggtctttctcccagcccattcccagcccttcctatttcctttcctattttttttttctccccacactttcttgggactcccaccttggaaggaggaagggctgacctgggttctctccagcccccaggtgcgccgggtcacccgtgccccttcattatggacctgggccctaccggaacccctgccccagttaccacaactcaggccggctggcccgggccatgggctgcgcaaatcaccagcccccaacccagggaggaactggcccctcctagggagcctcttcgacttttttagaaaaatgatctccatttctttccagccatgatgtttagtaaatatttttagtaccgcacttagcagacagctttccaagtgtgctttcttgccacaaaagtgtcctggcaagagccccttatttttaagacatcaggaagccagaccgctttgagttgggagaattttgtagctcaacatatcaagtcctcgatggtatctgagctgcccacacccccacctgccaaggccccacagagcccaaaacagaagggggctgccccagcccagcagagcacagagtttctggagctcccatccacagatgcaggagggggtactgatggtaacccccatgtggatttgagggcagcagtccctggcctcaccctagccagcctgggtggctccctagccccaagaggccaggaagggctggaaggcagggcctgcaggtgctccccgccctgagacccaggccccaaatcagcaataatgaacaaacccttggcccagcctgggctggtgacctgggcaccagagaccttgcatccctcctcatcctaggaggcccctaggggtgccccatctcagtgtcccctgaactctttatttgcctaatttatatatatatatatgagatatataaatatatataaaatagctattttgcttaaatttctacagtatgtaaaagtgaaaaaatgatgaagacgggtgcacctgtctgagtttggccctcatgtgagctgtgcccttccctctcctcatgcccccttccagcggcttctgccaaccatggggggctggaccaccatggccactgacccagcccctcagaatcccacactccaatcctttccatttcagtttagtcctaaaagttcatcacagggtctttctttctactccaggactggttttgtttttatatatataaaaaaaaaaagtgaaaacaccaatgtgtgaaatgccttacaatgcccactggagaggcggggcggggtggggcaggatggccccactggggctcctacagagctgtggaatgtacctctccccaacactgttttgttagcgagcaccttttgaccagtaataaaaaaccttggctttggagttttcc

SEQ ID NO: 97 - DNA, 3724 bp, Homo sapiens
tctccctcggcgccgccgccgccgcccgcggggctgggacccgatgcggttagagccgcggagcctggaagagccccgagcgtttctgctttgggacaaccatacatctaattccttaaagtagttttatatgtaaaacttgcaaagaatcagaacaatgcctccacgaccatcatcaggtgaactgtggggcatccacttgatgcccccaagaatcctagtagaatgtttactaccaaatggaatgatagtgactttagaatgcctccgtgaggctacattaataaccataaagcatgaactatttaaagaagcaagaaaataccccctccatcaacttcttcaagatgaatcttcttacattttcgtaagtgttactcaagaagcagaaagggaagaattttttgatgaaacaagacgactttgtgaccttcggctttttcaaccctttttaaaagtaattgaaccagtaggcaaccgtgaagaaaagatcctcaatcgagaaattggttttgctatcggcatgccagtgtgtgaatttgatatggttaaagatccagaagtacaggacttccgaagaaatattctgaacgtttgtaaagaagctgtggatcttagggacctcaattcacctcatagtagagcaatgtatgtctatcctccaaatgtagaatcttcaccagaattgccaaagcacatatataataaattagataaagggcaaataatagtggtgatctgggtaatagtttctccaaataatgacaagcagaagtatactctgaaaatcaaccatgactgtgtaccagaacaagtaattgctgaagcaatcaggaaaaaaactcgaagtatgttgctatcctctgaacaactaaaactctgtgttttagaatatcagggcaagtatattttaaaagtgtgtggatgtgatgaatacttcctagaaaaatatcctctgagtcagtataagtatataagaagctgtataatgcttgggaggatgcccaatttgatgttgatggctaaagaaagcctttattctcaactgccaatggactgttttacaatgccatcttattccagacgcatttccacagctacaccatatatgaatggagaaacatctacaaaatccctttgggttataaatagtgcactcagaataaaaattctttgtgcaacctacgtgaatgtaaatattcgagacattgataagatctatgttcgaacaggtatctaccatggaggagaacccttatgtgacaatgtgaacactcaaagagtaccttgttccaatcccaggtggaatgaatggctgaattatgatatatacattcctgatcttcctcgtgctgctcgactttgcctttccatttgctctgttaaaggccgaaagggtgctaaagaggaacactgtccattggcatggggaaatataaacttgtttgattacacagacactctagtatctggaaaaatggctttgaatctttggccagtacctcatggattagaagatttgctgaaccctattggtgttactggatcaaatccaaataaagaaactccatgcttagagttggagtttgactggttcagcagtgtggtaaagttcccagatatgtcagtgattgaagagcatgccaattggtctgtatcccgagaagcaggatttagctattcccacgcaggactgagtaacagactagctagagacaatgaattaagggaaaatgacaaagaacagctcaaagcaatttctacacgagatcctctctctgaaatcactgagcaggagaaagattttctatggagtcacagacactattgtgtaactatccccgaaattctacccaaattgcttctgtctgttaaatggaattctagagatgaagtagcccagatgtattgcttggtaaaagattggcctccaatcaaacctgaacaggctatggaacttctggactgtaattacccagatcctatggttcgaggttttgctgttcggtgcttggaaaaatatttaacagatgacaaactttctcagtatttaattcagctagtacaggtcctaaaatatgaacaatatttggataacttgcttgtgagatttttactgaagaaagcattgactaatcaaaggattgggcactttttcttttggcatttaaaatctgagatgcacaataaaacagttagccagaggtttggcctgcttttggagtcctattgtcgtgcatgtgggatgtatttgaagcacctgaataggcaagtcgaggcaatggaaaagctcattaacttaactgacattctcaaacaggagaagaaggatgaaacacaaaaggtacagatgaagtttttagttgagcaaatgaggcgaccagatttcatggatgctctacagggctttctgtctcctctaaaccctgctcatcaactaggaaacctcaggcttgaagagtgtcgaattatgtcctctgcaaaaaggccactgtggttgaattgggagaacccagacatcatgtcagagttactgtttcagaacaatgagatcatctttaaaaatggggatgatttacggcaagatatgctaacacttcaaattattcgtattatggaaaatatctggcaaaatcaaggtcttgatcttcgaatgttaccttatggttgtctgtcaatcggtgactgtgtgggacttattgaggtggtgcgaaattctcacactattatgcaaattcagtgcaaaggcggcttgaaaggtgcactgcagttcaacagccacacactacatcagtggctcaaagacaagaacaaaggagaaatatatgatgcagccattgacctgtttacacgttcatgtgctggatactgtgtagctaccttcattttgggaattggagatcgtcacaatagtaacatcatggtgaaagacgatggacaactgtttcatatagattttggacactttttggatcacaagaagaaaaaatttggttataaacgagaacgtgtgccatttgttttgacacaggatttcttaatagtgattagtaaaggagcccaagaatgcacaaagacaagagaatttgagaggtttcaggagatgtgttacaaggcttatctagctattcgacagcatgccaatctcttcataaatcttttctcaatgatgcttggctctggaatgccagaactacaatcttttgatgacattgcatacattcgaaagaccctagccttagataaaactgagcaagaggctttggagtatttcatgaaacaaatgaatgatgcacatcatggtggctggacaacaaaaatggattggatcttccacacaattaaacagcatgcattgaactgaaaagataactgagaaaatgaaagctcactctggattccacactgcactgttaataactctcagcaggcaaagaccgattgcataggaattgcacaatccatgaacagcattagaatttacagcaagaacagaaataaaatactatataatttaaataatgtaaacgcaaacagggtttgatagcacttaaactagttcatttcaaaattaagctttagaataatgcgcaatttcatgttatgccttaagtccaaaaaggtaaactttgaagattgtttgtatctttttttaaaaaacaaaacaaaacaaaaatccccaaaatatatagaaatgatggagaaggaaaaaaaaaaaaaaaaa

SEQ ID NO: 98 - DNA, 3241 bp, Homo sapiens
ggcttccccgccccgccccgtccccgggcgtctccattttggtctcaggtgtggactcggcaagaaccagcgcaagagggaagcggagttatagctaccccggccgcggagccggctcactgcactacccccgcccccttctttcctccagacgccgaagtcgcgggcgctcatggcgggcctggaggtactgttcgcatcggcagcgccggccatcacctgcaggcaggacgcgctcgtctgcttcttgcattgggaagtggtgacacacggttactgcggcttgggtgtcggtgaccagccgggtcccaatgataagaagtcagaactgctgccagctgggtggaacaacaataaagacctgtatgtcctccggtatgagtataaggatgggtccagaaagctccttgtgaaagccatcaccgtggagagcagcatgatcctcaatgtgctggaatatggctcacagcaagtggcagacttgaccctgaacttggatgattatatcgatgcagaacacctgggtgacttccacaggacctacaagaacagtgaggagcttcggtctcgtattgtgtctggaatcatcacacctatccatgagcagtgggaaaaggctaatgtaagcagtccccaccgggagttcccccctgctaccgccagagaggtggacccactccggattcctccacaccacccacacaccagtcggcagcctccctggtgtgatcccctgggcccgtttgttgtcgggggagaagacttagacccttttgggcctcggagaggtggcatgattgtggatcccctgagatctggcttcccaagagcacttattgacccttcctcaggcctcccgaaccgacttcctccaggcgctgtgcccccaggagctcgctttgacccctttggacccattgggaccagcccacccggacctaacccagaccatctccccccgccgggctacgatgacatgtacctgtgaaggcctcaagaatgtaacatcccaggcttccctccattctcctggagctgccaccgctgtccccatcagcaaccatgttcttgcaggctgggggcaagggattctgctcatgtgtttgcagaccggctgggatagcctccccaccccttatcagagccaagacacctgctgcagctctccacctagctgcagatagctcccaaagagaaatcagtgtgtctctttcaccatcagctcctcccctttcaccaccagctcctctccacttcccaagggagactccggcaaccttcagcaacatatatcctcgaccagatgcagtgctataagaacagaacgcattttggatgttattattaagaaccaaatgtcaatacagaattcatgttgccggtttcccacttttctttttacattaatgcatagctgcttccatttatgagactttagagtttgagtttctgtagggctgaatgactctttttcctgcccagggcccattcttgcttctcaggcaccttccgtttattaattgccattgctcctgacatcactaagatgggtccccttctggctgcatgaatggaaatgagtgactggaaatcccataggccacaagaatgactttcacaagggcaggaacattgtggaaagactgcatcattctgatgaggcaaaatcctccagctattcctgtctgggccagttttgtaggtccatctgtgcatgggcagcagtagtcaaaaagccaaggaaaaaacagagcagacctgaaggctaatcttatttttgccactaacttagtgaatgaccctaagcaagttccttctcctcttagggccttgtgccaagcctatgaaattggaggtggctttcctgctctaaagcattttgatgtctcattctgtgtttggtaacccctataaactggggcagaggaaaagaatgatggttcaaggccatacttcccttgaaccttgtgtggttcttgcctaactctgtggtttttggaccccatggggcccagacagagcacaggagcatgggctgcctctgagtgtggtgttgaacttcgggaggagcagggagccctgcaccttgtgtcctggcccacctgacctttggtgttctccggatccttttcagcccgaggcctgacagacgcgggcagtgatgagccctgttctggagtggaaagagcacgatagagcaccaggctaagaggcacgagatcaaggcggtagtcacttccgctctgcagctagcatttcaaccatatgtggatcctttcatttctcagctccctggattccttcccctaaattaggacctattatttacctgtaggtaagcaagctactgtagctcttctgaggtatctgccaggctgttttctgtagcctcagattgcctatctgcttagcctgagaacaggtagatgaaaactaaactgatgcctaggcccagggtcagtctcagatggaagctgggcctgggtggggaggctagcatgcgtggctccctgggtatttctgtcagtccccatggcaagcagtgatttagtaaaacaccccagagtcagggaagccaaccaccttgaaacctttagaacatctctgctttggagaaagacccagagatcaggcagaggtgcagattcaatcattactcataacctttgagagctggcaaatgggaggagtgttagtctttgttttggaattggaccattcttgcaaccaaaaggacttagagcagtttgctcataaagacatcctttattataaaaggaagtatttaaaggatgatagagaccatcagatagaagcagggaaggtagataacttttaggaccttgatgtgaggaaaagataaaatttaaacaataaatttgccacttagattttctagcagcaaagtccgaaaagatagttatatacaaaattctgttttctgaaaacaaaattgtgattcaccttcagaattggccattttttttgtgagtttccttgcatcaaggacactgagaaacacagtcattgtcttaggtgttctatgggaggaagtgaatagagcctttaggaacttcctggtcaagcttatggtgcttattttgatctgggccacttccctccttccagtcatgagtaatcatcaaggagcaagttggagtgtttcaggtgtatattttgtagaacccaaaagattggagccttaacaataaacatcagcactaagtgacctgttaaaaaa

SEQ ID NO: 99 - DNA, 3925 bp, Homo sapiens
agcggggctgcgcgaagtcatcgctgttccagacagcgatgactcgagagcggtgggggtggcggcgcgatcggccgggctgtaaccgtcgtctgtccgggagcggctggagcggcagcggcggccgggcacggcgcgaggtgacgccacagggcagcggcggcagcggaggcagcggcggcagcaggagacgcagcggcggccgcagcagcagcagcaagacggactcgtggagacgcgccgccgccgccgccgccgggccgggccgggtgtcgcgcgccgaggctgggggggagtcgtcgccgccgccgccaccgctaccgccgccgccgccgccgccgaggtgactgaggagagaggcgcctcctcgctcccgccaccgccggacttcaatgcccagtccccagctcgccagcgtttttcgttggaatatacgttgcacatttatggcgattctgagtgtgagggcagacttctgccaggctcagcacagcattttcgctgacaagtgagcttggaggttctatgtgccataattaacattgccttgaagactcctggacaccgagactggcctcagaaatagttggcttttttttttttttaattgcaagcatatttcttttaatgactccagtaaaattaagcatcaagtaaacaagtggaaagtgacctacacttttaacttgtctcactagtgcctaaatgtagtaaaggctgcttaagttttgtatgtagttggattttttggagtccgaatatttccatctgcagaaattgaggcccaaattgaatttggattcaagtggattctaaatactttgcttatcttgaagagagaagcttcataaggaataaacaagttgaatagagaaaacactgattgataataggcattttagtggtctttttaatgttttctgctgtgaaacatttcaagatttattgatttttttttttcactttccccatcacactcacacgcacgctcacactttttatttgccataatgaaccgtccagcccctgtggagatctcctatgagaacatgcgttttctgataactcacaaccctaccaatgctactctcaacaagttcacagaggaacttaagaagtatggagtgacgactttggttcgagtttgtgatgctacatatgataaagctccagttgaaaaagaaggaatccacgttctagattggccatttgatgatggagctccaccccctaatcagatagtagatgattggttaaacctgttaaaaaccaaatttcgtgaagagccaggttgctgtgttgcagtgcattgtgttgcaggattgggaagggcacctgtgctggttgcacttgctttgattgaatgtggaatgaagtacgaagatgcagttcagtttataagacaaaaaagaaggggagcgttcaattccaaacagctgctttatttggagaaataccgacctaagatgcgattacgcttcagagataccaatgggcattgctgtgttcagtagaaggaaatgtaaacgaaggctgacttgattgtgccatttagagggaactcttggtacctggaaatgtgaatctggaatattacctgtgtcatcaaagtagtgatggattcagtactcctcaaccactctcctaatgattggaacaaaagcaaacaaaaaagaaatctctctataaaatgaataaaatgtttaagaaaagagaaagagaaaaggaattaattcagtgaaggatgattttgctcctagttttggagtttgaatttctgccaggattgaattattttgaaatctcctgtctttttaaactttttcaaaataggtctctaaggaaaaccagcagaacattaggcctgtgcaaaaccatctgtttggggagcacactcttccattatgcttggcacatagatctccctgtggtgggattttttttttccctttttttgtgggggagggttggtggtatatttttcccctcttttttccttcctctcctacatctcccttttcccccgatccaagttgtagatggaatagaagcccttgttgctgtagatgtgcgtgcagtctggcagccttaagcccacctgggcacttttagataaaaaaaaaaaaaaacaaaaaacaacaccaaaaaaacagcagtgatatatatattccaggtggtttttagtctttactgatgaaagggtgttcatgttagtttcttcaaaaccctatctaatactaggcaaagtagccaagagccttttgttttgtttttattttgataaattagtggagaaatggcattttaagaggagtctcttctcaacttacctgagagtcgaattcttctcttccctaaccaatgaagctaagtggttatcccagaaacttgtcttctaaaagggaggactccaggccatcaataaagatgtccaggcagtgagcgtactttttacaccctgtagaattgtgggctgtagcgttactctgattttctgtctagtatcagagaatgctggtagcttaaaatttttattttaggacttgtactctgaattttcaggaaccgtcaaaggagcagcagcaaattcacatattttcgacttgagaaatgcttgtggtatgtgttttccaaactgccccctatatgtaaagttcagtttaaccactgattgccttgttattactaggttttttgagattaaaaaaaaaaaatccctggtttaaaaccaacaatgatgcctagtgagtatgtgtccacaggccataacagggtagaagagagacatcgtgcaacccaatgagtagtgaagggactgtgttgcttgtgaagcggtgtagtagcatttttgcagattcttggctgggtttagtgtactgatctagaaaagctgtttttctgctcctttgtggaaggcagttatgatcaggctgcatggacaaagcaggtagaggggcaccatcaggggctcttgcactattttcacctctaaatattacgtactcagtagtgccctgcttctagggctctgaatacgggcttaaagtcatcttgtcctgctggaatttgctgtgcagagccataagcctcccattttgttagcgtcagctaggccaataggaacagaccgggaccttgtctcacactgatgatacctcacatgttgaccggctatgtgaactgcctatttcctatgctggagttttgatttttaactaaacgcaaatctgtagattctctcctctcccatcccagaaaacaaaacaaaataatgcttttcgaaattgtttctaggactttaaaacataatggtatatccaaaattctttatttcagaatgcaacaatagattccattaatatagactcaagatcaaaacagcatacctgctaagctaagatagatggtgttgattccactgggttttgatcaatacaataacaaacctttttcctttgacatactctgaattttgttgtttggggggagggggtgtgtgtgtgtgtgtgtgtgtgtgtgtgtattgtgtgtgtgtgtgtgtgcacgcgcagtgtccatcagtatcagtgcctgcctgagttaggaaaattacattcctggttctgtattgaggagaaggatgtataaagcaacatgaaacattagccctccttttattttaaagactaatgttaattgttcttaaaactggattttttttccttaaagcaatttttttcttttcgatttaatgaagtattgctagctgaagccagtttgacatagagagatgtcagattgatttgaaaggtgtgcagcctgatttaaaaccaaaccctgaacccttttaaagaacaataaaacatattttacacgctcaaaaaaaaaaaaaaaaaaaaaaaaaaaaaaaaaaaaaaaaaaaaaaaaaaaaaaaaaaaaaaaaaaa

SEQ ID NO: 100 - DNA, 2709 bp, Homo sapiens
gctggtggaacccctgcacagagacggacacaggatgagctctaagtacccgcggtctgtccggcgctgcctgcccctctgggccctaacactggaagcagctctcattctcctcttctatttttttacccactatgacgcttccttagaggatcaaaaggggctcgtggcatcctatcaagttggccaagatctgaccgtgatggcggccattggcttgggcttcctcacctcgagtttccggagacacagctggagcagtgtggccttcaacctcttcatgctggcgcttggtgtgcagtgggcaatcctgctggacggcttcctgagccagttcccttctgggaaggtggtcatcacactgttcagtattcggctggccaccatgagtgctttgtcggtgctgatctcagtggatgctgtcttggggaaggtcaacttggcgcagttggtggtgatggtgctggtggaggtgacagctttaggcaacctgaggatggtcatcagtaatatcttcaacacagactaccacatgaacatgatgcacatctacgtgttcgcagcctattttgggctgtctgtggcctggtgcctgccaaagcctctacccgagggaacggaggataaagatcagacagcaacgatacccagtttgtctgccatgctgggcgccctcttcttgtggatgttctggccaagtttcaactctgctctgctgagaagtccaatcgaaaggaagaatgccgtgttcaacacctactatgctgtagcagtcagcgtggtgacagccatctcagggtcatccttggctcacccccaagggaagatcagcaagacttatgtgcacagtgcggtgttggcaggaggcgtggctgtgggtacctcgtgtcacctgatcccttctccgtggcttgccatggtgctgggtcttgtggctgggctgatctccgtcgggggagccaagtacctgccggggtgttgtaaccgagtgctggggattccccacagctccatcatgggctacaacttcagcttgctgggtctgcttggagagatcatctacattgtgctgctggtgcttgataccgtcggagccggcaatggcatgattggcttccaggtcctcctcagcattggggaactcagcttggccatcgtgatagctctcacgtctggtctcctgacaggtttgctcctaaatcttaaaatatggaaagcacctcatgaggctaaatattttgatgaccaagttttctggaagtttcctcatttggctgttggattttaagcaaaagcatccaagaaaaacaaggcctgttcaaaaacaagacaacttcctctcactgttgcctgcatttgtacgtgagaaacgctcatgacagcaaagtctccaacaataaaatacagccatgtaccacataacaacatcttggtaaacaacagactgcatatatgatggtggtcatccagtaagctaaggttaatttattattattccttgtttttttttttttttttttttttttgagatgtagtcttactctgtcacccaggctagagtgcaatggcaccatcttggctcactgcaacctctacctcctgggttcaagcaaatctcctgcctcagcctccaaagtagctgggattacaggcacccaccacatctggctaattttttgtatttttagtaaagatggggtttcaccatgttggccaggctgatctcaaactcctgacctcaagtgatctgcccgcctcggcctcccaaagtgctggaaccacaggcctgagccactgtgcccagccttgtttgcttttttaacagataacagtgtgctcatagaaactgctttgacatgactgcaatcatgtgcttcatagaaacttaattagattataccactagagtcttcagatttttatactttttttttttgaaacggagtctcactctgtcaccaggctggagtgcagtgccgcaatctcggctcactgcaacctccgcctcccaggttcaagcaattctcctgcctcagcctcccgagtagctgggattacaagtgcgcactaccacacccagctaatttttgcatttttacttgacagggtttcaccatgttggctaggatagtttcaccaggatctcttggcctcatgatcagcctgcctcggcctcccaaagtgctgggattacaggtgtgagccaccgtgcccagcctatacttccctttttgaataccatttggtgttttgaagaattaacagctttgtgaacgtggcagtgcttgtgattcaggcttccattgagaccaaggggagaacctggttgcaggacaaacagacggacagcgtgtggcagtgtttaaatgctcttctgaaggctgatacgacagctctctgtgcactgattgcatatgcatcccaagattatattattgttttctactgctatgtgtcacactttgccaaacaggatgtggaaaatgaataagcggttttcttaggcacttcttaacagacaattggtcaaaatgaactccattgcttaagaaacacataaacaccatttagtcactgaacatagctatatgtatggttgttactatgggaaatcttgttttgccaattttctttgaaaattctggcagaccaaggttctttttgtttacataatacttgaaaaataaaaatgaacaagctaacaaacta

SEQ ID NO: 101 - DNA, 4272 bp, Homo sapiens
aagaggttgggcggatgttgtgagccgggtcgctgcggccgaggctccggcccccaggaccactggctgcccatgagagatgaaggatggcatccaagggggccggcatgtctttctcccgcaagagctataggctgacctcagatgctgagaaatccagggtcacaggcattgtgcaggagaagctgctgaatgactacctgaaccgcatcttttcctcttctgaacatgcacccccagcagccaccagcaggaaacccctgaacttccagaacctgccagaacatttggaccagttgctacaggtggacaatgaggaggaggaaagccagggacaggttgaagggcggcttggcccatccactgtggtcctggaccacacaggcggctttgaggggcttctcctggtggatgatgacctgctgggggtgattggacacagcaactttggcaccatccgctctaccacatgcgtgtacaaagggaaatggctctacgaggtcctcatctcctcccaggggctcatgcagatcggctggtgcaccatcagctgccgcttcaaccaggaggagggggttggagatacacacaactcctatgcctatgatggcaaccgcgtgcgcaagtggaatgtgaccacaacgaattatggcaaggcgtgggcagcgggggacatcgtgagctgcctgattgacctggatgatggcactctgtccttctgcctgaacggtgtatcactgggcactgcctttgagaacctgtccaggggcctgggtatggcctacttcccagccatcagcctctctttcaaggagtccgtggccttcaactttggcagccgtcctctgcgctacccagtggcaggctaccggcccctgcaggacccaccgagtgctgacctggtgcgggcacagaggttgctgggctgcttccgggcagtgctgagtgtggagctggaccctgtggaggggcggctgttggacaaggagagctccaagtggcggttgcggggccagcccaccgtcctcctcacactggcccacatcttccatcactttgcaccgcttctgcgcaaggtgtatctggtggaggctgtgctcatgagcttcttgctgggcatcgtggagaagggcacacccacacaggcacagtccgtggtgcaccaggtcctggacctcttgtggctcttcatggaggactacgaggtacaagattgcctcaagcagttgatgatgtctctgcttcggctgtaccgattctcacccattgtcccagacctgggcctacagatccattacctgcggctcactatcgccatcctgaggcatgagaagtcccgcaagtttctgcttagcaatgtcctcttcgacgtgctccgctccgtcgtcttcttttacatcaagagccccctgcgtgtggaggaggccggcctgcaggagctcattcccaccacctggtggccccactgctccagtagggagggcaaagagagcacggagatgaaggaggagaccgcagaggagcggctgcggcggcgagcctacgaacggggctgtcagcggctcaggaagcgcatcgaagtggtggaagaactacaggtccagatcctgaagctgctgctggacaataaagatgacaatgggggtgaagcttctaggtatatcttcctgaccaagtttcgcaagtttctgcaggagaacgccagtggccgggggaacatgcccatgctctgcccccctgagtacatggtctgcttcttacaccggctgatctctgccctgcgctactattgggatgaatacaaggcttccaatcctcatgcttccttcagtgaggaggcctacatcccgccccaggtcttctataatggcaaggtggactactttgacctgcagcgcctggggggcctcctctcgcacctgcggaagaccctcaaagatgaccttgcttccaaagccaacattgtgatcgacccactggagctccagtcaaccgccatggatgacctagatgaggatgaggagccagccccagctatggcccagcgccccatgcaggccctggctgttggggggccactgcccctgccccggcccggctggctcagttctccaactttgggccgagccaaccgcttcctcagcacagcggctgtgagcctcatgaccccacggcggcctctgagcacctcggagaaagtgaaggtccgcacgctgagcgtggagcagaggacccgtgaggacattgaaggcagccactggaatgagggcttgctgctggggcggccccccgaggagcctgagcagcccctcaccgagaactcgctgctggaagtcctggatggggcggtcatgatgtacaacctcagcgtacaccagcagctgggcaagatggtgggtgtctccgatgatgtcaatgaatacgctatggctctgagggacacagaggacaagctccgccggtgccccaagaggaggaaggacatccttgcagagttgaccaagagccagaaggttttctcagaaaagctggaccacctgagccgccgtcttgcctgggtccatgccactgtctactcccaggagaagatgctggacatctactggctgctgcgcgtctgcctgcggaccattgagcacggtgatcgcacagggtctctctttgccttcatgcccgagttctacctgagcgtggccatcaacagctacagtgctctcaagaattactttggtcccgtgcacagcatggaggagctcccaggctatgaagagaccctgacccgcctggctgccattctcgccaaacactttgccgacgcacgcattgtgggcactgacatccgagactcactgatgcaggccctggccagctacgtgtgctacccacactccctgcgggctgtggagcgaatccccgaggagcagcgtatcgccatggtgaggaacctcctggcgccctatgagcagcggccctgggcccagaccaactggatcctggtgcggctctggaggggctgtggcttcgggtaccgctatacacggctgccacatctgctgaaaaccaaacttgaggacgccaatttgcccagcctccagaagccctgcccttccaccctgctgcagcagcacatggcggacctcctacagcagggtcctgatgtggcacccagcttcctcaacagcgtcctcaatcagctcaactgggccttctctgaattcattggcatgatccaagagatccagcaggctgctgagcgcctggagcggaactttgtggacagccggcagctcaaggtatgtgccacctgctttgacctctcggtcagcctgctgcgtgtcttggagatgactatcacactggtgcctgagatattccttgactggacccggcctacctctgagatgctgctgcggcgtcttgcacagctgctaaaccaggtgctgaaccgggtgacagctgagaggaacctgtttgatcgtgtggtcaccctacggctgcctggcctagagagcgtggaccactatcccattctggtggcagtgacgggcatcctggtgcagctcctggtgcgtggcccagcctcagagagagagcaagccacatcagtgctcctggcagatccctgcttccagctacgctcaatatgctatctcctgggacagccagagcccccagcacctggcactgctctgccagcccctgaccggaagcgcttctccctgcagagctatgcggattatatcagtgccgatgagctggcccaagtggaacagatgctggcgcacctgacctctgcatctgcccaggcagcagctgcctccctgcccaccagtgaggaggacctctgccccatctgctatgcccaccccatctctgctgtgttccagccctgtggccacaagtcctgcaaagcctgtatcaaccagcacctgatgaacaacaaggactgcttcttctgcaaaaccaccatcgtgtctgtagaggactgggagaagggagccaatacgagtactacctcctcagctgcctagccctcacagcctgtgccatcctggaacctccacctttgaacccagagccaggctgggccctatttatgagctccctttgcccttctcctgtatcccacaccaccacatccaacctccttgcctgcctgtatcctcattggtgggagcccagccatggccctaattgtgcctgagcttgactttcagtcagggccacagtgagcattaaattattattccatacaaaaaaaaaaaaaaaaaa

SEQ ID NO: 102 - DNA, 2553 bp, Homo sapiens
ctagaggaagaggtagctccacaggaggtacagctgcttacacatctctcctcagagctgtcccttgacttgggggtgaatttcaggccaacagggcttcctgggatacaagagcgttctccatggatctgccttactaccatggacgtctgaccaagcaagactgtgagaccttgctgctcaaggaaggggtggatggcaactttcttttaagagacagcgagtcgataccaggagtcctgtgcctctgtgtctcgtttaaaaatattgtctacacataccgaatcttcagagagaaacacgggtattacaggatacagactgcagaaggttctccaaaacaggtctttccaagcctaaaggaactgatctccaaatttgaaaaaccaaatcaggggatggtggttcaccttttaaagccaataaagagaaccagccccagcttgagatggagaggattgaaattagagttggaaacatttgtgaacagtaacagcgattatgtggatgtcttgccttgaagataaggctgccggacaaagcaagttgaagagatgagtaacagttctcactgatgacccacttctgcaggcataggtccagagcaccaaactctagtggacaattcagactctcctggttgtgtaactgaagatgttctgcccaccagcaccagaggtcactctccacatccccgcctcccagacatataccaggagcaatttcaaaaccctctccagtttcactcttctttcttggaatgggacagcctgaacattttccctttgacttgttaaaggtaccaccctacatcatggttgacaccctcctttggaccatgcagtcagaggggcagctttatacagaggaggggcacacttgtctgtgagtttgaagccctgagttccagtcctgtggctgtgtgactttgaacacgtttctgcccatctccaggtcttagtttctttgtctctgtggttgggtgggatgataaacattgccccagtctctctgttgagcctgcttgtgtcaggtgaaggtgagggatcgggagtgatggagatgcatacagatcagcaccttctctgtacctgctggacccccatgtgcacccttctccctccagcctgggctactctcctcctggttctttctaatcttaaacttcctggtgagcattgccccagccacactttctccctggttttgcttaattccacttatgcatcagtcatttcaacagcatgaatgtggttctgtacagtgatgtatgtggagatttctaaaatattctatgtgtgatttctgttcccaactaggttctaagtgccatcaaagcacggttgggtctcccttgtatcttccacagtgtgtagaaatttgtgctgcccagagctgtgcctagttcatagaaactgactggaagcacattgctgagggaggtttgttgaattggtttttaaggtttattgaaattgatttgctgaatttttctgctagttcaaaatgtgaattaggacctggtcagtttgaaatataccaaattctatgccctttctcttacctatcatcaaattgtagtaatgtatttcaccccactggacttatcttcagagttttaaaagagaggagctctcgacttagaggtaatatgaacagatgaacagacactgtggctggagccccaaagtgtggagcattgtgagatttggggtcacagcaatttatggctactattccctgggtctggtaggtaggacaaatgtcctcttttacttttcaaaactggcttaggtattcatggaccttgattcttctatatacattttataataaatacgtgaaattgcttaaaacctctttttggaatttttaatgaacttgcaacaaatttgtaaataggagagaactgacgttcttgtgatgttttcccatgcataaacatgccacatccatgttcttgggtcatcttttttgccctttcatggagtcataaattttcccaactgaagtcttgtatattctgttagattaattcctatttctagttgctgtaaatgatatcttatgttttattacatttctaataggatatggtgttggtgaaatgttaaccctctcattagatctactagtttacctgttgattctattgtgttttctatgtaaatgattttgtcagctataaataataacattttattttctctttccttgcaatacctatgctcatttattttttatgtttacccattggttagggcctcctgtatacattaaacagttcatagtcatgatagtgagtattcttacactgttcccagtattacagggaatgcttagaaattttctttatttaaacattatgtttgttgtagccttgttaaaggctattttataatttttactagaaatattttgacatttattgtgatttttttctatctctaatctattgagatagtcacattccttttgtcttcactccattataaaggtaagttaccttaataaaattgttgatatcatttcatcaaaaaaaaaaaaaaaaaa

SEQ ID NO: 103 - DNA, 2481 bp, Homo sapiens
atggcggagccctcggccccggagagcaagcacaagtcgtccctcaactcgtccccgtggagtggcctcatggccctgggaaacagccggcacggccaccacgggcccggggcccagtgcgcgcacaaggcggcgggcggcgcggcgccgccgaagccggccccggcggggctgtccggggggctgtcgcagccggctgggtggcagtcgcttctctccttcaccatcctcttcctggcctggcttgccggcttcagctcgcgcctcttcgccgtcatccgcttcgaaagcatcatccacgagttcgacccgtggtttaactatagatcaacacatcatcttgcatctcatgggttctatgaatttttaaattggtttgatgaaagagcatggtatccactaggaagaatagtaggtggtactgtttacccagggttgatgataaccgctggccttattcattggattttaaatacattgaacataactgttcacataagagacgtatgtgtgttccttgcaccaacttttagcggccttacatctatatctactttcctgcttacaagagaactttggaaccaaggagcaggacttttagctgcttgttttattgctattgtaccaggctacatatctcggtcagtagctggatcctttgataatgaaggcattgctatttttgcacttcagttcacatactatttatgggtaaaatctgtaaaaactgggtcagttttttggacaatgtgctgctgcttatcctatttctatatggtctctgcttggggtggttatgtatttatcatcaatcttattccactgcatgtatttgtgttgttactgatgcagagatacagcaaaagagtctacatagcatatagcactttctacattgtgggtttaatattatcaatgcagataccttttgtgggattccagccaatcagaacaagtgaacacatggcagctgcaggtgtctttgcattgctgcaagcttatgctttcttgcagtatctgagagaccgattaacaaaacaagagttccagacccttttctttttgggtgtatcactagctgcaggtgctgtgttccttagtgtcatctatttgacttatacaggttacattgcaccatggagtggcaggttttattcattgtgggatactgggtatgcaaaaatacacattccaattattgcatcagtgtctgagcatcaacctacgacttgggtgtctttcttctttgatctacatattcttgtatgtaccttcccagcaggcctttggttctgcatcaaaaatatcaacgatgaaagagtatttgttgctctatatgcaatcagtgctgtctactttgctggagtgatggtgcgactgatgttgactttgactccagtcgtgtgtatgctgtctgcaattgccttttcaaatgtttttgagcactatttgggggatgacatgaaaagggaaaatccacctgtggaggacagcagtgatgaggatgacaaaagaaaccaaggaaatttgtatgataaggcaggtaaagtgaggaaacatgcaactgaacaggaaaaaactgaagagggattaggccctaatataaaaagcattgtcaccatgttgatgctgatgctattgatgatgtttgctgtccactgtacctgggtcacaagcaatgcctactctagtccaagtgtagtcctggcctcatacaatcatgatggcaccaggaatatcttagatgattttagagaagcttacttttggctaaggcaaaatacagatgaacatgcacgagtaatgtcttggtgggattatggctatcagatagctggaatggctaatagaactacgttggtggataataacacctggaataacagccacatagcactggtgggaaaagctatgtcttctaatgaaacagcagcctataaaatcatgaggactctagatgtagattatgttttggttatttttggaggggttattggctattctggtgatgatatcaacaaatttctctggatggttaggatagctgaaggagaacatcccaaagacattcgggaaagtgactattttaccccacagggagaattccgtgtagacaaagcaggatcccctactttgttgaattgccttatgtataaaatgtcatactacagatttggagaaatgcagctggattttcgtacacccccaggttttgaccgaacacgtaatgctgagattggaaataaggacattaaattcaaacatttggaagaagcctttacatcagaacactggcttgttaggatatataaagtaaaagcacctgataacagggagacattagatcacaaacctcgagtcaccaacattttcccaaaacagaagtatttgtcaaagaagactaccaaaaggaagcgtggctacattaaaaataagctggtttttaagaaaggcaagaaaatatctaagaagactgtttaa

SEQ ID NO: 104 - DNA, 509 bp, Homo sapiens
attctttccccaagtctctatggtagcgtcagcgtcggaggcggtagtgacggtggcgtttccttgaggaagagtgagggttccaacttttctgcttatctgggaggtgttgggcgcggacagtcgagatgtcagagaaaaagcagccggtagacttaggtctgttagaggaagacgacgagtttgaagagttccctgccgaagactgggctggcttagatgaagatgaagatgcacatgtctgggaggataattgggatgatgacaatgtagaggatgacttctctaatcagttacgagctgaactagagaaacatggttataagatggagacttcatagcatccagaagaagtgttgaagtaacctaaacttgacctgcttaatacattctagggcagagaacccaggatgggacactaaaaaaatgtgtttatttcattatctgcttggatttatttgtgtttttgtaacacaaaaaataaatgttttgatataaaaaaaaaaaaa

SEQ ID NO: 105 - DNA, 7389 bp, Homo sapiens
gtttctctctctggtcggaagcggcggtaatggcggatggtgggttgtggcgccggcggcggctgctgtgagggacgatgagtgcctccttcgtgccgaacggggccagcctggaagattgtcactgtaacctcttctgcctggctgacttgacaggaattaagtggaaaaaatatgtatggcaaggcccaacttctgcccctattctgtttcctgtgacagaagaagaccccattttgagcagttttagtcgctgccttaaggcagatgtacttggtgtttggcggcgagatcaaagacctggaagaagagaattgtggatattttggtggggtgaagacccagttttgctgaccttattcaccatgacttatcagaagaagaagatggaatgtgggagaatggactttcctatgaatgccgtactctgcttttccaaagcagttcacaatctattggaacggtgtttaatgaacaggaattttgtacgtattggcaagtggtttgtaaagccttatgaaaaagatgaaaaacctataaataaaagtgaacacttgtcctgctccttcacctttttcttgcatggagacagcaatgtttgtaccagtgtggaaattaaccaacatcaacctgtataccttctcagtgaagagcatatcacccttgctcaacagtctaatagcccatttcaagttatcttatgcccatttggactaaatggcactctcacaggacaggcattcaagatgtctgattcagctacaaaaaaattaattggtgaatggaaacagttctatcctatctcatgttgcttgaaggagatgtctgaagaaaaacaggaagatatggattgggaagatgattctttagctgcagtagaagttcttgttgctggtgtccgaatgatctacccagcatgctttgttctagtccctcagtcagacattcctactcctagccctgtgggatccactcactgttcatcttcttgcttgggtgtccaccaagtgcctgcttccacaagagatcctgctatgtcttcggttacgcttacaccacctacgtctcctgaggaagtccaaacagttgatcctcagtctgtccagaagtgggtcaaattttcttcagtatctgatggcttcaactccgatagtactagccaccatggtgggaaaatacccagaaaattagcaaatcatgtggtggatagagtttggcaagaatgcaatatgaacagagcacagaacaagaagaagtattctgcttcatcaggtggtctatgcgaagaagcgacagctgctaaagtggcatcctgggattttgttgaagccacacaaagaacaaattgcagttgtttgaggcacaaaaatctcaagtcaagaaatgctggacaacaaggacaggcaccatctttaggtcagcaacaacaaatacttcctaagcacaagaccaatgagaagcaagaaaagagtgaagagccacagaaacgccccttgactccttttcaccatcgtgtgtctgttagtgatgatgttggcatggacgcagattcagccagccaaagacttgtgatctctgctccagacagtcaagtgagattttcaaatatccgaactaatgatgtagcaaagactcctcagatgcatggcaccgaaatggcaaattcacctcaaccacccccacttagtcctcacccttgtgatgtggttgatgaaggagtgactaaaacaccttcaactcctcagagtcaacatttttatcaaatgccaacaccagatcccttggttccttctaaaccaatggaagataggatagacagtttgtcccagtctttcccacctcaatatcaggaagctgtagaacctacagtatatgttggtacagcagtaaacttggaagaagatgaagccaatatagcctggaagtattacaagttcccaaagaaaaaagatgtagagtttttaccacctcaacttccaagtgataaattcaaggatgatccagttggaccttttggacaggaaagtgtaacatcagttacagagttaatggtgcaatgtaagaaacctttaaaagtttctgatgaattagtgcagcaatatcaaattaaaaaccagtgtctttcagcaatagcatctgatgcagaacaagaacctaaaattgatccatatgcatttgttgaaggagatgaggaattcctttttcctgataaaaaagatagacaaaatagtgagagagaagctggaaaaaaacacaaggtagaagatgggacatctagtgtaacagtgttatcacatgaagaagatgctatgtcattatttagtccctctatcaagcaagatgctccacgccctactagtcatgcccgtcctccatcaacaagtttgatttatgactcagacctggctgtctcttatactgaccttgataatctcttcaattctgatgaagatgaactaacacctggatctaaaagatcagcaaatggatcagatgataaagccagctgcaaggaatcaaagacaggaaatctggacccgttatcttgcataagcactgcagatcttcataaaatgtatcctacaccaccatcattggaacaacatattatgggattttccccaatgaatatgaataataaagaatatggtagtatggatacaacacctggaggaactgttctagaaggaaatagttctagtataggagcgcagttcaaaattgaggttgatgagggattctgtagccccaaaccttctgaaattaaagatttttcttatgtctataagcctgaaaattgtcaaattctagtgggatgttccatgtttgcacctctaaaaactctaccaagccaatatctgccccttatcaaattgccagaagagtgtatttaccgtcagagttggactgttggaaaattggaattgctttcttcagggccttcaatgccattcatcaaagagggtgatggaagtaatatggatcaagaatatggcactgcttatacacctcaaactcatacttcttgtgggatgcctcctagcagtgcacctcctagtaacagcggagcaggaattcttccttctccatccacccctcggtttccaactccaaggactccaaggactcctcggactcctcgtggagctggtggacctgctagtgctcaaggttcagtcaaatatgaaaattcagacttgtattcaccagcttctaccccatctacatgcagaccccttaattctgttgaacctgcaactgtcccttccatccctgaagcacacagtctttatgtaaacctcatcctttcagaatcagttatgaatttgtttaaagactgtaactctgatagttgttgcatctgtgtttgcaacatgaacatcaagggtgccgatgttggagtttacattccagatccaacgcaggaagcacaatataggtgtacctgtggcttcagtgctgtcatgaacagaaaatttggaaacaattcaggattatttcttgaagatgaactagatatcataggacgcaatacagactgtggcaaagaagcagaaaaacgttttgaagctctcagggctacctctgctgaacatgttaatggaggactaaaggaatctgaaaaattatctgatgatttgatattattgctacaagatcagtgcactaatttattttcaccctttggagcagcagaccaagatccttttcctaaaagtggtgtaattagcaattgggtacgtgttgaagagcgtgactgttgcaatgactgctaccttgcattagaacatgggcgtcagttcatggataacatgtcaggaggaaaagttgatgaagcacttgtgaaaagttcatgcttacacccctggtccaaaagaaacgatgtgagtatgcagtgctcacaggatatacttcgaatgctcctctctcttcagccagttcttcaggatgccattcagaaaaaaagaacagtaagaccttggggtgttcagggtcctctcacttggcaacaatttcataaaatggctggccgaggctcttatggaactgatgaatccccagaaccactgccaatccccacatttttgttgggttatgattatgattatctggtgctttctccatttgctcttccttattgggagagacttatgctggaaccctatggatctcaaagagatatagcctatgttgtactgtgtccagaaaatgaagccttgttaaatggagcaaaaagcttttttagagatcttactgcaatatatgagtcctgtcgattaggtcaacatagacctgtttctcgactgttaacagatgggatcatgagagttggatctactgcatcaaagaaactatcagaaaagttggtagcagaatggttttctcaggcagctgatggtaacaatgaagcattttctaaactcaagctttatgcacaagtctgcagatatgacctaggtccttatcttgcttccctgccattggacagctctctactttcccagccaaatttagttgcccctacaagtcagtctttgattactccacctcagatgacaaatactggaaatgctaatactccatctgccaccttagcatctgcagcgagcagcactatgacagtgacttcaggtgttgccatatctacttcagttgccacagctaattcaactttgaccacagcttcaacttcatcttcatcatcctccaacttgaatagtggagtatcatcaaataaactaccttcgtttccaccctttggcagtatgaacagtaatgctgcaggatccatgtctacacaagcaaatacagttcagagtggtcagctaggagggcaacagacatcagctctacagacagctgggatttctggagaatcatcttcacttcccactcagccgcatcctgatgtgtctgaaagcacgatggatcgggataaagtgggaatccccacagatggtgattcacatgcagtcacgtatccacctgcaattgttgtttatataattgatccttttacatacgaaaatacagacgagagcactaactcttctagtgtgtggacattggggctacttcgatgctttctagaaatggtccagactcttcctcctcatatcaagagtactgtttctgtacagattattccttgtcagtacctgttgcaacctgtgaagcatgaagatagagaaatctatccccagcatttaaaatccctggctttttcggcctttacccagtgtcggaggccacttccaacatcaaccaatgtgaaaacattgactggctttggtccaggtttagccatggaaactgcccttagaagtcctgatagaccagagtgtattcgactttatgcacctccttttattctggctccagtgaaggacaaacagacagagctaggagaaacatttggagaagctggacagaaatataatgttctttttgtgggatactgtttatcacatgatcaaaggtggattcttgcatcttgcacagatctatatggagaacttttagaaacttgtatcattaacatcgatgttccaaatagggctcgtcggaaaaaaagttctgctagaaaatttggtctacagaaactttgggagtggtgcttaggacttgtacaaatgagttcattgccatggagagttgtaattggtcgtctaggaaggattggtcatggagaattgaaagattggagctgtttgctgagtcgtcgaaacttgcagtctctaagtaaaaggctcaaagacatgtgtagaatgtgtggtatatctgctgcagactcccctagcattctcagtgcttgcttggtggcaatggagccgcaaggctcttttgttattatgccagattctgtgtcaactggttctgtatttggaagaagcacgactctaaatatgcagacatctcagctaaataccccacaggatacatcatgtactcatatacttgtgtttcctacttctgcttctgtgcaagtagcttcagctacttataccactgaaaatttggatttagctttcaatcccaacaatgatggagcagatggaatgggtatctttgatttgttagacacaggagatgatcttgaccctgatatcattaatatccttcctgcttctccaactggttctcctgtacattctccaggatctcattacccccatggaggtgatgcgggcaagggtcagagtactgatcggctactatcaacagaacctcatgaggaagtacctaatattcttcagcaaccattggcccttggttactttgtatcaactgccaaagcaggtccattacctgactggttctggtcagcatgtcctcaagcacaatatcagtgtcccctttttcttaaggcctctttgcacctccacgtgccttcagtgcaatctgacgagctgcttcacagtaaacactcccacccacttgactcaaatcagacttcagatgtcctcaggtttgttttggaacagtacaatgcactctcctggctaacctgtgaccctgcaacccaggacagacgctcatgtctcccaattcattttgtggtgctgaatcagttatataactttattatgaatatgctgtgatcttcatttgatggaactgtgcaagaaaagaacaaggaaaaatggatgtttcgctgcaggattaagttacaattatcttctcagtgaaggtcatttgtgatggggtctaattcttattacttcaacaaatattgttttgacttggggggaggggctataaccctgctatttttcattgactctattgaactctttaggatgatgactgatcatacaaaacgtattataacattttcgtagcaaaattaaccttttttttttccagtcacagtatttgtgaaaagtaatgagccatagtacccagtcatgttaaatgaatattaaaagcatggagaggaaacatgaggaacaatgaatttcaacatatggcttcagaacatgaagatgttcttgtatggattatagtatctagtattcaaaaatgcctgcatctcttctcttatttattgtaagtttttaaatgtataaattgtcttatatttcttaacctcttttataaaaattttcctagaaggtttatactgccttcttgctttaaagcaattggtctaaaatatatgtaatcgtcttaattaaaaagttgcagtagggttgcttttagagtattatttttttgtaagggggtgggtgggacagtaaatttgtattgtctcgatgtacagtttaacggggatagagggggaataatgtccataccattgtgtgtggaggatttacagctaagctgtagttgcagagtacatgtacagtaatgaagttcactgtgtttataaattgaaaaggtacc

SEQ ID NO: 106 - DNA, 6428 bp, Homo sapiens
gctagtggaagttactgccgcgccaccgagtccggaccggagactttggggcctaactagtgaatggtagtgtctagaaagggtatgtcccttcaagagagaggtgccaatgtccaaccggcctaataacaatccaggggggtcactgcgacgttcacagaggaacactgccggggcccaaccacaagacgactcaataggaggaagaagctgcagttcatcatctgctgtgatagttccacaaccagaggatccagacagagccaatacttcagaaagacaaaaaacggggcaggtgcctaagaaagacaattctcgaggagtgaagcgcagtgctagtccagactacaacaggaccaattctcctagctctgcaaaaaaaccaaaagcacttcagcatactgaatctccctcagaaacaaataagccacatagtaagtcaaagaagagacatttagaccaggagcaacaactgaaatctgcacaatcaccatcaacaagcaaggctcataccaggaagagtggggccactggcggttcacggagtcagaaaagaaaaaggacagagagttcttgtgtaaagagtggctccgggtctgaatcaactggtgcagaagagagatctgcgaaacctaccaagctggcttcaaaatcagccacctcagccaaagctgggtgtagcaccatcactgattcttcttctgctgcctctacttcctcctcgtcttctgctgtagcctcggcctcctccactgtaccaccaggtgccagagtgaaacaaggaaaagatcagaacaaggccaggcgttcccgttcagcgtccagtcccagccccagaagaagtagcagggaaaaggaacagagtaaaactggtggctcttcaaaatttgattgggctgctcgtttcagccctaaagttagccttcctaaaacaaaactgtctcttccagggtcttctaagtcagagacatcaaaacctggaccttctggattacaggccaaattagcaagtttaagaaaatctacgaagaaacgcagtgagtctccacctgctgagctccccagtttgaggcggagcacacgccaaaagaccacgggctcctgtgctagtaccagtcggcgaggctctggcctgggcaaaagaggagcagctgaagctcgtcgacaggagaaaatggcagaccctgaaagcaaccaggaggcagtaaattcttcagctgctcggacagatgaagctccccaaggagctgcaggggctgttggcatgaccacctctggggagagtgaatcagatgattccgagatgggacgtttgcaagctttgttagaggcaaggggtcttccccctcacctatttggtcctcttggtcctcggatgtcacagcttttccatagaacaattggaagtggagctagttctaaggcccagcagctactacaaggattgcaagccagtgatgaaagtcaacagcttcaggcagttattgagatgtgtcagttactggtcatgggaaatgaggagacactgggagggtttcctgtcaagagtgttgttccagctttgattacgttacttcagatggagcacaattttgatattatgaaccatgcttgtcgagccttaacatacatgatggaagcacttcctcgatcttctgctgttgtagtagatgctattcctgtctttttagaaaagctgcaagttattcagtgtattgatgtggcagagcaggccttgactgccttggagatgttgtcacggagacatagtaaagccattctacaggcgggtggtttggcagactgcttgctgtacctagaattcttcagcataaatgcccaaagaaatgcattagcaattgcagctaattgctgccagagtatcacgccagatgaatttcattttgtggcagattcactcccattgctaacccaaaggctaacacatcaggataaaaagtcagtagaaagcacttgcctttgttttgcacgcctagtggacaacttccagcatgaggagaatttactccagcaggttgcttccaaagatctgcttacaaatgttcaacagctgttggtagtgactccacccattttaagttctgggatgtttataatggtggttcgcatgttttctctgatgtgttccaactgtccaactttagctgttcaacttatgaaacaaaacattgcagaaacgcttcactttctcctgtgtggtgcctccaatggaagttgtcaggaacagattgatcttgttccacgaagccctcaagagttgtatgaactgacatctctgatttgtgaacttatgccatgtttaccaaaagaaggcatttttgcagttgataccatgttgaagaagggaaatgcacagaacacagatggtgcgatatggcagtggcgtgatgatcggggcctctggcatccatataacaggattgacagccggatcattgagcaaatcaatgaggacacgggaacagcacgtgccattcagagaaaacctaacccgttagccaatagtaacactagtggatattcagagtcaaagaaggatgatgctcgagcacagcttatgaaagaggatccggaactggctaagtcttttattaagacattatttggtgttctttatgaagtgtatagttcctcagcaggacctgcggtcagacataagtgccttagagcaattcttaggataatttattttgcggatgctgaacttctgaaggatgttctgaaaaatcatgctgtttcaagtcacattgcttccatgctgtcaagccaagacctgaagatagtagtgggagcacttcagatggcagaaattttaatgcagaagttacctgatatttttagtgtttacttcagaagagaaggtgtaatgcatcaagtaaaacacttagcagaatcagagtctttgttgacaagtccaccaaaggcatgtacgaatggatcgggatccatgggatccacaacttcagtcagcagtgggacagccacagctgccactcatgctgcagctgacttgggatcacccagcttgcagcacagcagggatgattctttagatctcagccctcaaggtcgattaagtgatgttctaaagagaaaacgactgccaaaacgagggccaagaaggccaaagtactcacctccaagagatgatgacaaagtagacaatcaagctaaaagccccaccactactcagtcacctaaatcttctttcctggcaagcttgaatccaaaaacatggggaaggttaagtacacagtccaacagcaacaacattgagccagcacggactgcgggaggtagtggccttgccagggctgcctcaaaggataccatctccaataatagagaaaaaattaaaggttggattaaggagcaggcacataaatttgtagaacgttatttcagttctgagaatatggatggaagcaaccctgcattgaatgtccttcagagactttgtgctgcaaccgaacaactcaacctccaggtggatggtggagctgagtgccttgtagaaatccgtagcatagtctcagagtcagatgtttcatcatttgaaatccaacatagtggatttgtgaagcagctgttgctttatttgacatctaaaagtgaaaaggatgctgtgagcagagagatcagattaaagcgatttcttcatgtatttttttcttctccacttcctggagaagagcccattggaagagtggaaccagtgggtaatgcacctttgttggcattagttcacaagatgaacaactgcctcagccagatggaacaatttccagtcaaagtacatgatttccctagtggaaatgggacaggaggcagcttttctctcaacagaggatcacaggctttaaaatttttcaacacacatcaattaaaatgccagttacaaaggcatccagactgtgcaaatgtgaagcagtggaagggtggacctgtcaagattgaccctctggctttggtacaagccatcgagagataccttgtagttagagggtatggaagagtaagagaagatgatgaagacagcgatgacgatggatcagatgaggaaatagatgagtctctggctgctcagttcctaaattcaggaaatgtaagacacaggctgcagttttatattggagaacatttgctgccgtataacatgactgtgtatcaggcagtacggcagtttagtatacaggctgaagatgaaagagaatccacagatgatgagagcaatcctctaggcagagctggtatttggacaaagactcatacaatatggtataaacctgtgagagaggatgaagaaagtaataaagattgtgttggtggtaaaagaggaagagcccaaacagctccaacgaaaacttcccctagaaatgcaaaaaagcatgatgagttatggcacgatggagtgtgcccatcagtatcaaatcctttagaagtttacctcattcccacaccacctgaaaatataacatttgaagacccgtcattagatgtgatccttcttttaagagttttacatgctatcagtcgatactggtattacttgtatgataatgcaatgtgcaaggaaattattccaactagtgaatttattaacagtaagttaacagcaaaagcaaataggcaacttcaagatcctttagtaatcatgacaggaaacatcccaacatggcttactgagctaggaaaaacctgcccatttttctttccttttgatacccggcaaatgcttttttatgtaactgcatttgatcgggaccgagcaatgcaaagattacttgataccaacccagaaatcaaccagtctgattctcaagatagcagagttgcacctagattggatagaaaaaaacgtactgtgaaccgagaggagctgctgaaacaggcggagtctgtgatgcaggacctcggcagctcacgggccatgttagaaatccagtatgaaaatgaggttggtacaggtcttgggcctacactggagttttatgcgcttgtatctcaggaactacagagagctgacttgggtctttggagaggtgaagaagtaactcttagcaatccaaaagggagccaagaagggaccaagtatattcaaaacctccagggcctgtttgcgcttccctttggtaggacagcaaagccagctcatatcgcaaaggttaagatgaagtttcgcttcttaggaaaattaatggccaaggctatcatggatttcagattggtggaccttccccttggcttacccttttataaatggatgctacggcaagaaacttcactgacatcacacgatttgtttgacatcgacccagttgtagccagatcagtttatcacctagaagacattgtcagacagaagaaaagacttgaacaagataaatcccagaccaaagagagtctacagtatgcattagaaaccttgactatgaatggctgctcagttgaagatctaggactggatttcactctgccagggtttcccaatatcgaactgaagaaaggagggaaggatataccagtcactatccacaatttagaggagtatctaagactggttatattctgggcactaaatgaaggcgtttctaggcaatttgattcgttcagagatggatttgaatcagtcttcccactcagtcatcttcagtacttctacccggaggaactggatcagctcctttgtggcagtaaagcagacacttgggatgcaaagacactgatggaatgctgtaggcctgatcatggttatactcatgacagtcgggctgtgaagtttttgtttgagattctcagtagttttgataatgagcagcagaggttatttctccagtttgtgactggtagcccaagattgcctgttggaggattccggagtttgaatccacctttgacaattgtccgaaagacgtttgaatcaacagaaaacccagatgacttcttgccctctgtaatgacttgtgtgaactatcttaagttgccggactattcaagcattgagataatgcgtgaaaaactgttgatagcagcaagagaagggcagcagtcgttccatctttcctgattatagcaagaaatgcagtgtctgcctgttacagcaaaagaaacaaatcatgatttcttttctaatgttatcacctgagtcaaggaaacatgttacgccttcttgttgtaggaaaaacggcttgcagattataaagagacatttggttgatattcattaatggccccatggacttaaagtgatcaggccctaaaacgttgttgtgatgaggtttctttagcaagttcttgtttaaattatcatttatttgatgagtgaagtttttaacatgctttgctgtgtgaaatttaaaaaagggatgtttttccaggctggaacaataaatgtggctgtgcagttt

SEQ ID NO: 107 - DNA, 497 bp, Homo sapiens
  misc_feature (72)..(72): n is a, c, g, t or u
  misc_feature (94)..(94): n is a, c, g, t or u
  misc_feature (253)..(253): n is a, c, g, t or u
  misc_feature (370)..(370): n is a, c, g, t or u
  misc_feature (404)..(404): n is a, c, g, t or u
  misc_feature (414)..(414): n is a, c, g, t or u
  misc_feature (472)..(472): n is a, c, g, t or u
ttttttttttttttttttttgttttaaactacaaaggatgttgcatacactgatgaatctgtatctgactanaagtgctcaggggttggaaggngacagaaaacaaaggcaaaatttgcattgcctttccatctgaaatgaaaaactgcacaactattaaccaacatttaataggataatttttaaacagctcatgcgtcaacaagataaatttctttctagacaagagacaagactgaatccaataaaaagngtcatagctccagttgggagagaaaaaaaaaaaactacagaatatttatgatagcattacaaacaggatcctacgcaactatgcaaaagaggttgcccacatttgtattgaacaaangctttgaattcttgcccttccactcttctcttgngactttctgngctgtcagccctagtattcgctgtcaaccacaatactaagctgtaggacaaatccagnggtccaatgaggctgattacacctt

SEQ ID NO: 108 - DNA, 5911 bp, Homo sapiens
aattgcctctcaccccccggaggggttattttgggggtggttggaggcggtggcggcggcggcgaggaggggaatttccttgtgcctccattcccgggaggggggagcggcgttggaggccaccgtttccagcatcaacaacagcaacttgtgattggcggtgaccggatattcagttgcacatccccacatcaatgcactgccaatgggttatatcctgtgttgtgacctcatggtttaagtgggaataaagatgagtataagcagtgatgaggtcaacttcttggtatatagatacttgcaagagtcaggattttctcattcagcatttacctttggtatagaaagccatatcagtcagtccaatataaatggtgccctcgtcccacccgctgcattgatttctatcatccagaaaggtctacagtatgtagaagcagaagttagtattaatgaggatggtaccttgtttgatggtcgaccaatagagtctctgtccctgatagatgccgtaatgcctgatgtagtacaaacaagacaacaagcttatagagataagcttgcacagcaacaggcagcagctgctgcagctgccgcagctgcagccagccaacaaggatctgcaaaaaatggagaaaacacagcaaatggggaggagaatggagcacatactatagcaaataatcatactgatatgatggaagtggatggggatgttgaaatccctcctaataaagctgttgtgttgcggggccatgaatctgaagtttttatctgtgcctggaaccctgttagtgatctcctagcatcagggtctggagactcaacagcaagaatatggaatcttagtgagaacagcaccagtggctctacacagttagtacttagacattgtatacgagaaggagggcaagatgttccaagcaacaaggatgtcacatctctagattggaatagtgaaggtacacttctagcaactggttcctatgatgggtttgccagaatatggactaaagatggtaaccttgctagcaccttagggcagcataaaggccctatatttgcattaaaatggaataagaaaggaaatttcatcctaagtgctggagtagacaagactacaattatttgggacgcacatactggtgaagccaagcaacagtttccttttcattcagcaccagcattggatgttgattggcagagcaacaacacctttgcttcttgtagtacagatatgtgcattcatgtctgtaaattaggacaagacagacctattaaaacattccaaggacatacgaatgaagtaaatgctatcaaatgggacccaactggcaatctcttggcctcctgttctgacgacatgactttaaagatatggagtatgaaacaagacaattgtgtccatgatttgcaagcacataataaagaaatttatactatcaaatggagtccaacaggaccagggactaataatccaaatgccaaccttatgttagcaagtgcatcctttgattctactgttaggttatgggatgtagaccgagggatatgcatccataccttgacaaaacaccaagagcctgtgtacagtgtagctttcagtcctgatggcaggtatctggcaagtggttcttttgacaaatgtgtacacatctggaacacgcagacaggtgctctagttcacagctataggggaacaggtggaatatttgaagtttgctggaatgcagcaggagacaaagttggagccagtgcatcagatggttcagtttgtgtattagaccttcggaaatagcgctactagttggaagccatggaccgactatgaatgtgtacatagccaaaatgactgtccctgacccatgtactgctatagtcccacttgaaccatggccagtccactacagccaaatctaaaagaaatatatacatacagtgtatataaacaaaattgcaccctgaagatgacagagttttgtcacagcttgtgaattctgttcaccaagtgctggaatctaatctgctgtgcccctaaaatagcatttagaagttttggatatgaaaaacagaagagagaaaaatatacattataaaagcagaacatacatgtaccagtttttggatactaaatgacagccttgtttctcccctttgaatcagcagacaccatggattatattctttttttcccttcagtagtgagcagtttgtatgtacagagaaaatggacttacaaaaacttgcagcagtagtttgttcttgctttaaaatttcgtttttggtttagattatggatgcatgaagtaagggagtgaatcagtttcttgtttatatttttttcaccttttaaacaaaaaattctttaaaatattttaatgcattcttttgaagaggtagatgtttggtacattttatggctcccagagcatatattcagttggtgcatgttgtggaagggggaattggaaattaaatgaaaacctatgactttggtcatgtcaatctgtaagacacatcagtaaaagggtattatgctctgttggttttgtttttttgttttgctttttttttttttttttcttttttgttttttggtgatgtggcttaaatgcaatagtttcttttttgggacatatttctgccaattaaagactagaagggcacaactttttttttaattaccatagagaagatacattaaaaaaaatcttctgatgttttgtagccataactaaattatggtaaaaatgtgcactattgtgaaaaggagcaacgtagttttgggttttttgttgtttgtttgttttgctttgttttttaagagattaaaatgtttctggataaggattagcttctcgaagtgtccatcattctgtgtagaagcttaaatatgtaatgtaaccaaactccagtattaaaaatctctcatgttgttttctttatacaaagcaagataacggcatataacactgccattacatggcaaaatgtttgctaccttagtttaaaaaacaatctcaaacaaaagacttgcttcaaggtgtttttaaatagcagtgattcagaattttttttaatgaaagtataattgcactaaccttcttcctgctgctctgattctgcatttgtggtacttgtgactacgttttttcaaatatagatagatttaagctgctaatttttttttttttagtaatcactactatatcatgtcttttactctgtttataatatcaagtattttcttaaagatatagatattaaaccttgtgctcatgcaacttagagtaacatatacagacaaatgattgcatgaggccatgtttatatgtgtgactaataaggcttgtcatgattaacataatccaggtatgtcatttctgaagagaatagtcatcaaatttatatctcgaagattttaattaaggaattgcttattgttgagcttagcaaattaataacactatttctgtcactaattattttgaggccttttagtactaaaattttaacctgtgttctaagtagaaactgatttaacccaagtaatgcagctttgattgatttcagcattcgttgctttgctatttttacaaaacagcattgattgaagcaagtcttggttttactaaggtagggtagcatttgctattggtaaagagaataaatacacttaatttcacaatacattgttatatgtaccccagttgttgttagtggggactatgatactgtaataatatttttaaaaatttacatcaagagaggcagtcattcacgatggttttgtgccagctctttttagggttttggatcacattagagatatttagaacatattaccctgtgacttacgtaggaaacctaatatgctgagtatctggcacttgaattcctgcttttattgctggaggtccacatctgtggttgacctctgttattgtttaaaaaaaataaataaaaattaaaaaaatctgtgcaataattttaaaatgtgctcccaggaatagacacaaatgttttgagtatcttttaagctgcattttcctttagtgatgcatttgtcaattgcactgaatttaaatctgaaagtcagaggtgattattgatagtacttttgtattttgatatggacagtttattcatttgcatacagttattgactttttcccagctgattaaaagatagtcaagaaattctgcaatatagctgccaaaatagacagctacatttttatgatattgtcatcttttctgttttttttttcttttttttctttagctattttacttaagcataatagccacaataggacatataaaagattataaatacagagctttattatcctgacgtcttgggtcttttaagtatatacttttctgaaaggtatccattttgtaggcttgggttcttcatgagcatacgattgtttatttttgctgctgttctcaacatcatcattgcctgctgatgtgccacgatgctgctccaatagacagcaataagattgtctctaatttgagcagtaacatgattgcaagagaccaagtttcacagcttgtaaagttctgtatttgggattcttgcttatttttccgcctgtgtttttctgagaacttattcctgatgatcaattgaatccagtagtttttctatgctatttgttgttgtataagctactgtaagaaacttatcataaggaaaaatagaaaggaaaacttgaatcaatactcattgattaaaatggaataaagaaagagcagctgccacttttaaacaacataaaggaatatctttttttgtctccgtgtaggaaatcccataagttcttatatttgttccagttcccatttcctgccattgaccagataacatcattgactttcaaatgacttttagaagtgataactcttaatttcctaatagatactagattgtattgaattctgttttaattattctctaggtaagtatgttttaggattaaataccttttacagatactgaaagtgcctccttttgtggtgtaaaaaacaaattatggtgcaaaaagtaatcactagattgaaatacatgaaggttttttgctttttgacatacgaaaatgtcaagagaaaggccaaagatttgtactttttcacttacaaagcactcctttttcccttaaacttctttctgtcaaattagatttaatgagagagtactatttttaaggagctatctgtttatgtagaatgattttgttaagagtaatgtaaactattattgagtagaggcctaaagaggactgtgcatttttgctatttaaaggaatcacaaatgatcatacttaagtgagcaaaaatgacaagttttactagctaagtagagaaataaatctcaaatgcagcgctacaattttcattatcttaagcacattgtacatttctacagaacctgtgattattctcgcatgataaggatggtacttgcatatggtgaattactactgttgacagtttccgcagaaatcctatttcagtggaccaacattgtggcatggcagcaaatgccaacattttgtggaatagcagcaaatctacaagagaccctggttggtttttcgttttgttttctttgttttttcccccttctcctgaatcagcagggatggaaggagggtagggaagttatgaattactccttccagtagtagctctgaagtgtcacatttaatatcagttttttttaaacatgattctagttaaatgtagaagagagaagaaagaggaagtgttcacttttttaatacactgatttagaaatttgatgtcttatatcagtagttctgaggtattgatagcttgctttatttctgcctttacgttgacagtgttgaagcagggtgaataactagggcatata

SEQ ID NO: 109 - DNA, 1736 bp, Homo sapiens
cgaccctcagcagccagcccggcccgcccgcgcccgtccgcagccgcccgccagacgcgcccagtatgagggagatcgtgcacatccaggccggccagtgcggcaaccagatcggggccaagttctgggaagtcatcagtgatgagcatggcatcgaccccagcggcaactacgtgggcgactcggacttgcagctggagcggatcagcgtctactacaacgaggcctcttctcacaagtacgtgcctcgagccattctggtggacctggaacccggaaccatggacagtgtccgctcaggggcctttggacatctcttcaggcctgacaatttcatctttggtcagagtggggccggcaacaactgggccaagggtcactacacggagggggcggagctggtggattcggtcctggatgtggtgcggaaggagtgtgaaaactgcgactgcctgcagggcttccagctgacccactcgctggggggcggcacgggctccggcatgggcacgttgctcatcagcaaggtgcgtgaggagtatcccgaccgcatcatgaacaccttcagcgtcgtgccctcacccaaggtgtcagacacggtggtggagccctacaacgccacgctgtccatccaccagctggtggagaacacggatgagacctactgcatcgacaacgaggcgctctacgacatctgcttccgcaccctcaagctggccacgcccacctacggggacctcaaccacctggtatcggccaccatgagcggagtcaccacctccttgcgcttcccgggccagctcaacgctgacctgcgcaagctggccgtcaacatggtgcccttcccgcgcctgcacttcttcatgcccggcttcgcccccctcacagcccggggcagccagcagtaccgggccctgaccgtgcccgagctcacccagcagatgttcgatgccaagaacatgatggccgcctgcgacccgcgccacggccgctacctgacggtggccaccgtgttccggggccgcatgtccatgaaggaggtggacgagcagatgctggccatccagagcaagaacagcagctacttcgtggagtggatccccaacaacgtgaaggtggccgtgtgtgacatcccgccccgcggcctcaagatgtcctccaccttcatcgggaacagcacggccatccaggagctgttcaagcgcatctccgagcagttcacggccatgttccggcgcaaggccttcctgcactggtacacgggcgagggcatggacgagatggagttcaccgaggccgagagcaacatgaacgacctggtgtccgagtaccagcagtaccaggacgccacggccgaggaagagggcgagatgtacgaagacgacgaggaggagtcggaggcccagggccccaagtgaagctgctcgcagctggagtgagaggcaggtggcggccggggccgaagccagcagtgtctaaacccccggagccatcttgctgccgacaccctgctttcccctcgccctagggctcccttgccgccctcctgcagtatttatggcctcgtcctccccacctaggccacgtgtgagctgctcctgtctctgtcttattgcagctccaggcctgacgttttacggttttgttttttactggtttgtgtttatattttcggggatacttaataaatctattgctgtcagatacccttaaaaaaaaaaaaaaaaaaaaaaaaa

SEQ ID NO: 110 - DNA, 6138 bp, Homo sapiens
acttccggttgctgtgctgagtcggaagtgggaacccttcggccgctgagattctgtcgtgtcgtcgctgctggcacttcaggctctgcctctcccactaggtctggatggaggataccttaaagtgaaatgacagaccaggagaataacaacaacatctcaagtaacccctttgctgctctttttggctccctggctgatgccaaacagtttgcggcaatccaaaaagagcagctgaagcaacaatctgatgaactcccagctagcccagatgactcggataatagcgtgtcagagagcctggatgaattcgattactctgtggctgagattagccgctcattccgatcacagcaggaaatatgtgagcaactcaacatcaatcacatgatccaaaggatcttccttattactctggacaacagtgatcccagcttgaaaagcgggaatggcatccctagccgttgtgtgtatttggaagaaatggcagtagagctagaagatcaagactggcttgatatgagcaatgttgagcaggccctcttcgctcgcttattacttcaagatccaggcaaccacttaattaacatgacttcttctacaacgctaaatctctctgctgatcgagatgcaggagagaggcacattttttgttacctttactcctgcttccagagagccaaggaagagattaccaaagttccagagaacctgctaccctttgcagtgcagtgcagaaacctcactgtgtccaatacccgaacagttcttctcaccccagagatctatgttgaccaaaacatccatgagcaactggtagatttgatgttagaagccatccagggagcccgtgagtacatgaacaagatctattttgaagatgtaactgagtttctggaagaggtcattgaagccttgatattggatgaggaagttagaacatttccagaagtcatgattccagtgtttgatattttattgggccgaataaaagatctagagctctgtcagatccttttgtatgcatatctggatattcttctctatttcactaggcaaaaagatatggcaaaggtttttgtagaatacattcagcccaaggaccctaccaatgggcaaatgtaccagaagaccttgctgggagtaattctgagtatctcctgcttattaaagactccgggtgttgtagaaaatcatggctactttttgaatccatctcgttccagcccccaggagatcaaagtacaggaggccaacatccatcagttcatggctcagttccacgaaaagatctaccagatgctgaagaacttactccagctctctccagaaaccaaacactgtatcttgtcctggcttggaaactgtttgcatgcaaatgcaggccgcaccaagatttgggccaatcagatgccagaaatctttttccaaatgtatgcctcagatgctttctttctgaatctgggtgctgctctcctgaagctatgccagccattttgcaaacccagatcctctcggctcctcacctttaatcccacatactgtgccctcaaggagttgaatgatgaagaacgaaaaattaaaaatgtacacatgagaggtttggacaaagaaacctgtttgatcccagctgtgcaggagccgaagtttccacagaactacaaccttgtaacagagaaccttgctctgacagagtacaccttgtacttgggatttcacaggttgcatgatcagatggtaaaaatcaaccaaaatctgcatcggctgcaggttgcctggcgggatgctcagcaaagttctagccctgctgctgacaatcttcgtgagcagtttgaacgactgatgaccatctatctttctaccaagactgccatgacagagccacaaatgctacaaaactgcctaaacttgcaggtgtccatggctgttctactggttcaactggccataggcaatgagggctcacagccaatagagctaacctttcctttgccagatggctacagctctttggcttatgtgccagaattttttgcagataacctgggtgattttctcatttttctccgccgctttgccgatgacattttggagacatcagcagattccctggagcatgtccttcactttatcaccattttcactggaagcatagaaagaatgaagaatccccacctgagggccaaactagcagaggtgttggaagcagtgatgccccacctggatcagaccccaaatcccttggtatccagtgtgttccaccggaaacgtgtgttctgcaactttcagtatgcaccccaacttgcagaggctctaatcaaggtttttgtggacatcgaatttacaggagacccccatcaatttgaacagaagtttaattaccgccgtcccatgtatcctatcctaagatacatgtgggggacagatacctatcgggagagcattaaggatttggctgactatgcctctaagaatttagaagccatgaatcccccacttttcctccgctttcttaacctgctaatgaatgatgccatcttccttttggatgaagccatacagtatttgagcaagataaagattcagcaaattgagaaggatcgaggtgaatgggatagtctgactccagaagcccgccgagaaaaggaggctggcctacagatgtttggacagctggcacgtttccataacatcatgtccaatgaaacaatcggtacccttgcctttctcacatcagagatcaagtcactctttgtgcatcccttcctggctgagcgcatcatctccatgttgaactacttcctgcaacacctggttggccccaagatgggtgccttaaaagtcaaggacttcagcgaatttgacttcaaaccccagcagcttgtatcagatatctgcactatctacttaaatcttggggatgaggagaatttctgtgccactgtgcccaaggatggacgttcctattccccaactctctttgcacagacagttcgagtcttgaagaaaataaataagcctgggaatatgattatggctttcagcaacttggcagagagaatcaagtctcttgcagacctccaacaacaggaagaggaaacctatgcagatgcctgtgatgagttcctggatcccattatgagcacactgatgtgtgaccctgtggtgctgccatcttccagagtcactgtggatagatccaccattgcaagacatttgctcagtgaccaaacagatccctttaaccgtagtcccctcaccatggaccagatccggccaaacacagaactaaaagaaaaaatccaacggtggcttgcagagaggaaacaacaaaaggagcaacttgaatagatactgtgaactaaccaaaccaaaaccaaccccagagtgcagataaacaattgtttgtggtttctctctttctggttctgttccttttctttcttcttttctttttcttttttttttttttttttactaaattagagaactgctcttgctgaaattatgatagttaagattcctaagaacttgacaatgctcccctggcttgcaggaaattatacttattatagcatcaccaagtttagaaatcatcactaattttcaccctctgttgtctcttcatattcttcttccttttcctaaatgaaattatattatttcaactactaaaacttcccgccaccctgctatttctcttccaattactgttcaaacatttttggtgagtgctgcttttataaatatgtgatgtcacatatttcagtgacagctgatgttatcagaaaaatcctgttatcctgtgtatttactagtcctcatgatctagacttaaccccttttctgtgttacagagtaacttcacataaaagcagatacctttaagtttgtgtagacttctgaataagatgatagacgagaattttttttaaaaaaggaatttaaaggaatcttgtgcaacttctgttgatagctcttaattttgttatacagtctttttaatgaggattggtagggcaatcctaccaattgatgggggtgaggagactgttgggcccttattctcttatgaaaatctgtttctacaaggactaggcctaagtagatttaggcaacgggtatcatatccatgaaaaatgtcattttaagacactaatatcaacagtatatctcagtgtgtgagatatataaatacacatacaccccatgtgcttttttgttggtttagtgtaaactgagtaccactttatattttctcttccatagtgagatgtatgcagtatgtggccatgtttactaacatactcattcttcacaaaattctgagattataaaatgtatatagttaatatttgtttgagcttgtgacctgacttctaagagctacttctaacacagccttaggtcttcaattaacaaagtaggaagttgagcacaaccttgtccacagccattttaaatatccacttagccctgtgtagttggtaggtggacaccactttcataagtgaacttgagctcactactcaattgtgcagcttaatatgctgactagggacattcccctatggattatctttatatcactgtctttctaagcccagagatgtcataagtgacaagaaaagtgataggatcaagaaatgggtgtcactgcttcatttggaacatgttattaactatggtctctttcaaataaatagtagttttatatttcaacacaagttgctataagcagtccttgatgggtttttgattgcatcagctggaaagcctcaaatctaagagggcttcccatcctagatataaaataggtgttgcctattgctgtgcttataaaatgaaaaaggaaattgaggacacttttgcaaatgccagaatgtaagattcattcagtgtgctccctgggcctttatggcatgggttgacaggatttgtttattttctaaaattagcttcattcaatatttatcatcctcctttccctctctgagaatgaactatgtataaaataagcttctgcctatttgcatttatcttccaaacccaatctagtaggatgttctcattttaaaaacgaggggaaaagaccagagtttttcaggagaaaactggaggaaaatgggcacaaaaactcagaaggcagctattcccagcagcttcctagttaacaacccccatgctgcctccagtctttgtctgtattcttctgtatttaaccttcagattgtaagccttttctggcaagcttttcttctttttttaaactcttttcctgaaactttttatgaatggctatggcaccattaatgctgctgaatatctttaaactctgcacaagcaagtgtgtagcttaaggccactactggtaaggaaaccaagtgtcctctgtgccttttttctttctgtgaagtaatttaagaatatccaaaaaaattagactttaaaaagttatcttggtacaacaccgtgtgtatatacacttggaagcttaaaaaggtgttttgtctggaacttagaagcagctctaaatctagtagagcagactttctaacatacctagttttgtgtattggctttgctggagtatgatagcaaaatgaagactcttttactcagctctggtattgctcataacttaccaagaggctaatactaaacttggaaaattgtttaagtatgttttatcaagcagtctgggttttgttttttaatatactttttaatggatatgtgaaaactgaaggaaatgttaaaggttttttaatggtgcaagtgaaggtgccagttgctatttgatatcacactctacaaaagcttcattactttatttgatggtggttgctaagcagccattgcacagagcataagtctactgggtgcctttacatgccagaggctgatgctgcactgttgatgtcatgtgaggaaataatgcacatgctctaactgctcaacaggaaatgaacctagaaacagaaaatgaaaaggttgattgaaataaaacttgatcaacgcgactgtattttgaaacattccaggaaggttacttcttgtcaaacttgcctggcagtgtttgttcaaaacttgtatttaataaatgaacatctgacttacaaaaaaaaaaaaaaaaaa

SEQ ID NO: 111 - DNA, 3032 bp, Homo sapiens
gaattccggagaaaggcgcaggggtgggagctgttgccgaagctgccacagcaaaagttctcccccctccccccttcccctcctctcaaggcccctagaaaggttggagctgccggccctgcagtcggtgaccgctgacgacttcggccgcgcccgcggatagcgggaggaatcagcagcttggaaattcaagcacgtgatctggcgggatgggcgtttgcctaacgtatttaatggaggaatcggatggcataagtgattaaggtggtattgaggatttctgaagcctatgaaaggtagaaactcaaccatgatttctttttcaactctacagcattcctttccttgaagtcttcgtttttaccttagtctcgggcagttatacttaagcatgaacattgacgacaaactggaaggattgtttcttaaatgtggcggcatagacgaaatgcagtcttccaggacaatggttgtaatgggtggagtgtctggccagtctactgtgtctggagagctacaggattcagtacttcaagatcgaagtatgcctcaccaggagatccttgctgcagatgaagtgttacaagaaagtgaaatgagacaacaggatatgatatcacatgatgaactcatggtccatgaggagacagtgaaaaatgatgaagagcagatggaaacacatgaaagacttcctcaaggactacagtatgcacttaatgtccctataagcgtaaagcaggaaattacttttactgatgtatctgagcaactgatgagagacaaaaaacaaatcagagagccagtagacttacagaaaaagaagaagcggaaacaacgttctcccgcaaaaatccttacaataaatgaggatggatcacttggtttgaaaacccctaaatctcacgtttgtgagcactgcaatgctgcctttagaacgaactatcacttacagagacatgtcttcattcatacaggtgaaaaaccatttcaatgtagtcaatgtgacatgcgtttcatacagaagtacctgcttcagagacatgagaagattcatactggtgaaaaaccatttcgctgtgatgaatgtggtatgagattcatacaaaaatatcatatggaaaggcataagagaactcatagtggagaaaaaccttaccagtgtgaatactgtttacagtatttttccagaacagatcgtgtattgaaacataaacgtatgtgccatgaaaatcatgacaaaaaactaaatacatgtgccatcaaaggtggccttctgacatctgaggaagattctggcttttctacatcaccaaaagacaactcactgccaaaaaagaaaaggcagaaaacggagaaaaaatcatctggaatggacaaagagagtgctttggacaaatctgacctgaaaaaagacaaaaatgattacttgcctgtttattcttcaagtactaaagtaaaagatgagtatatggttgcagaatatgctgttgaaatgccacattcgtcagttgggggctcgcatttagaagatgcgtcaggagaaatacacccacctaagttagttctcaaaaaaattaatagtaagagaagtctgaaacagccactggagcaaaatcaaacaatttcacctttatccacatatgaagagagcaaagtttcaaagtatgcttttgaacttgtggataaacaggctttactggactcagaaggcaatgctgacattgatcaggttgataatttgcaggaggggcccagtaaacctgtgcatagtagtactaattatgatgatgccatgcagtttttgaagaagaagcggtatcttcaagcagcaagtaacaacagcagggaatatgcgctgaatgtgggtaccatacgttctcagccttctgtaacacaagcagctgtggcaagtgtcattgatgaaagtaccacggcatccatattagagtcacaggcactgaatgtggagattaagagtaatcatgacaaaaatgttattccagatgaggtactgcagactctgttggatcattattcccacaaagctaatggacagcatgagatatccttcagtgttgcagatactgaagtgacttctagcatatcaataaattcttcagaagtaccagaggtcaccccatcagagaatgttggatcaagctcccaagcatcctcatcagataaagccaacatgttgcaggaatactccaagtttctgcagcaggctttggacagaactagccaaaatgatgcctatttgaatagcccgagccttaactttgtgactgataaccagaccctcccaaatcagccagcattctcttccatagacaagcaggtctatgccaccatgcccatcaatagctttcgatcaggaatgaattctccactaagaacaactccagataagtcccactttggactaatagttggtgattcacagcactcatttcccttttcaggtgatgagacaaaccatgcttctgccacatcaacacaggactttctggatcaagtcacttctcagaagaaagctgaggcccagcctgtccaccaagcttaccaaatgagctcctttgaacagcccttccgtgctccctatcatggatcaagagctggaatagctactcaatttagcactgccaatggacaggtgaaccttcggggaccagggacaagtgctgaattttcagaatttcccttggtgaatgtaaatgataatagagctgggatgacatcttcacctgatgccacaactggccagacttttggctaaaaaaaaaaaaaaagtgaaataatactggcactttagaacagattaatcaagagtggggttactatgtgtaaatggagtgctgtacagatttaagagcaatgcgtaataacaagttaagctgatatacgatgataataactgcatttcgtttggttagtcagcattctttgaactgccttacatgttgtcacctttatagaagcaatgcattacttgttttagatcagaaacttgctattccacccacaccaagtaa

SEQ ID NO: 112 - DNA, 1224 bp, Homo sapiens
gcccattgtttttgtaatctctgaggagaagcagcagcaaacatttgctagtcagacaagtgacagggaatggattccaaacaccagtgtgtaaagctaaatgatggccacttcatgcctgtattgggatttggcacctatgcacctccagaggttccgagaagtaaagctttggaggtcacaaaattagcaatagaagctgggttccgccatatagattctgctcatttatacaataatgaggagcaggttggactggccatccgaagcaagattgcagatggcagtgtgaagagagaagacatattctacacttcaaagctttggtccacttttcatcgaccagagttggtccgaccagccttggaaaactcactgaagaaagctcaattggactatgttgacctctatcttattcattctccaatgtctctaaagccaggtgaggaactttcaccaacagatgaaaatggaaaagtaatatttgacatagtggatctctgtaccacctgggaggccatggagaagtgtaaggatgcaggattggccaagtccattggggtgtcaaacttcaaccgcaggcagctggagatgatcctcaacaagccaggactcaagtacaagcctgtctgcaaccaggtagaatgtcatccgtatttcaaccggagtaaattgctagatttctgcaagtcgaaagatattgttctggttgcctatagtgctctgggatctcaacgagacaaacgatgggtggacccgaactccccggtgctcttggaggacccagtcctttgtgccttggcaaaaaagcacaagcgaaccccagccctgattgccctgcgctaccagctgcagcgtggggttgtggtcctggccaagagctacaatgagcagcgcatcagacagaacgtgcaggtttttgagttccagttgactgcagaggacatgaaagccatagatggcctagacagaaatctccactattttaacagtgatagttttgctagccaccctaattatccatattcagatgaatattaacatggagggctttgcctgatgtctaccagaagccctgtgtgtggatggtgacgcagaggacgtctctatgccggtgactggacatatcacctctacttaaatccgtcctgtttagcgacttcagtcaactacagctgagtccataggccagaaagacaataaatttttatcattttgaaataa

SEQ ID NO: 113 - DNA, 2279 bp, Homo sapiens
aggtggagccttttttgctcacggcagcaagttcccttctcctttctctcccccggcggcgtgtgcattggctcttcaagctgcctgtgctgctccgtggagtgaaaaaggcagggtgtgctcgcagactgtgctataaactgcaatttctatttggggtcctcacggagaagaacaccaggaaagacagacaggaccagtgccatgggccagctttgctgctttcctttctcaagagatgaaggaaaaatcagtgaaaagaacggaggggagcccgatgacgctgaactagtaaggctcagtaagaggctggtggagaacgcggtgctcaaggctgtccagcagtatctggaggaaacacagaataaaaacaagccgggggaggggagctctgtgaaaaccgaagcagctgatcagaatggcaatgacaatgagaacaacaggaaatgagcccggaacgcaggcccccatgtctctgtgcaaagcctccctgcttccctctgctgagtctagggactgacttgcagcgtgctgtttaagttaagtttctctggtgcaatctgtgaagattgcctaatacttttcatgatcgatgtgttcgcattgctgaaacacaacagaagaaaaatggagtgctgggactggcagaggaaattaattgatgaaagaagaatggcccaagtttcattcgccctcagccacgcacaagggaaagggaactttgggttatgcctcctggacgcaaattaaaggccgagaaagaggccttgccatcaatggaatactgccatttatattgcttagcagggcatttgactactttatctgaggccagaactctcacacacagctatcaagtgctaagtttaaaataatcactgttggaattgtcatctgtacaattagtccataatgtttcatgtttgtcctaagtgtgctgttgctatgcagtgtgatctttatttatagtaaattatgtttcatgtaaatgatatatttttggtgaaatgcaaccttttctataaaatgtgggcaacattttaaagtttttttaaaatcctattttgataagtcagtatgccatatttaatgaaatgttattatataatttttttttcttaggcaagaaacctattggaattcgagacttaattaatgaagctttgcatcgagaaacgatgggtctgaagtccaaagtgaaacagataaaggaacttttattaaagcctgagactcaggccagaattaggagggagctttttgaaggaagacttattaacaacagtaattcagcaaatgacgttgatttcagcacaactttgacataagctctacattgcgattgtgacaacatagcttatgaaatcttttcagcttattaagtagctctttggtaaacaccaaagaagtttctgatagtgtctgcacaacagcaaaccaacatttggtgaggaattagcaatttcttgccaaagaaaattgattctgcccaattattttttgagctacacttgtgttttagaatatctgtttctgtaatattgagagttattttatagaaatgatttcttaattagctgttgtgagatatttctcgggtccttgcagaaaaaaacatacagactgtgaacaaatcattcacaaacagaataaaacagagccaacaacagtattttaagggtcacttgcctcctgttgacacaattgttgctaaatcaaaagaagcgttgtccaggtgtgtctacatctagtgttacttttaatgagaatttgaatgtttattgaacaatagtacttgaatgaacatttataaatgtaattattgcgatcactggttaagaatgttttatatatccttataatatttttcactgatcaaaatgttgttctgctttttcatttcttaaggaatacatgtttgggatttttattttttacgtgtccgaagataagctccaggtcttatcgtatcccttgccatctgaacttgtttgcactgcttctgtttgaaagagcatcttgaaaaacttccccggtatgatgattgttggtaacaactttttctatagtcattgatggagtagatcatgatggaggggaaatcactggagatcaaatatgtaaaatcatttcaaatataaaatccagtttactcatggattttagctattttttcactgggtaaattatactacatttatttacaaatgagtttatgcattttcatggctcttaataaacatattgttttcccttgaaaaaaaaaaaaaaaaaaaaaa

SEQ ID NO: 114 - DNA, 1937 bp, Homo sapiens
cacctgtcattcgttcgtcctcagtgcagggcaacaggactttaggttcaagatggtgactgcagccatgctgctacagtgctgcccagtgcttgcccggggccccacaagcctcctaggcaaggtggttaagactcaccagttcctgtttggtattggacgctgtcccatcctggctacccaaggaccaaactgttctcaaatccaccttaaggcaacaaaggctggaggagattctccatcttgggcgaagggccactgtcccttcatgctgtcggaactccaggatgggaagagcaagattgtgcagaaggcagccccagaagtccaggaagatgtgaaggctttcaagacagatctgcctagctccctggtctcagtcagcctaaggaagccattttccggtccccaggagcaggagcagatctctgggaaggtcacacacctgattcagaacaatatgcctggaaactatgtcttcagttatgaccagtttttcagggacaagatcatggagaagaaacaggatcacacctaccgtgtgttcaagactgtgaaccgctgggctgatgcatatccctttgcccaacatttctttgaggcatctgtggcctcaaaggatgtgtccgtctggtgtagtaatgattacctgggcatgagccgacaccctcaggtcttgcaagccacacaggagaccctgcagcgtcatggtgctggagctggtggcacccgcaacatctcaggcaccagtaagtttcatgtggagcttgagcaggagctggctgagctgcaccagaaggactcagccctgctcttctcctcctgctttgttgccaatgactctactctcttcaccttggccaagatcctgccagggtgcgagatttactcagacgcaggcaaccatgcttccatgatccaaggtatccgtaacagtggagcagccaagtttgtcttcaggcacaatgaccctgaccacctaaagaaacttctagagaagtctaaccctaagatacccaaaattgtggcctttgagactgtccactccatggatggtgccatctgtcccctcgaggagttgtgtgatgtgtcccaccagtatggggccctgaccttcgtggatgaggtccatgctgtaggactgtatgggtcccggggcgctgggattggggagcgtgatggaattatgcataagattgacatcatctctggaactcttggcaaggcctttggctgtgtgggcggctacattgccagcacccgtgacttggtggacatggtgcgctcctatgctgcaggcttcatctttaccacttctctgccccccatggtgctctctggagctctagaatctgtgcggctgctcaagggagaggagggccaagccctgaggcgagcccaccagcgcaatgtcaagcacatgcgccagctactcatggacaggggccttcctgtcatcccctgccccagccacatcatccccatccgggtgggcaatgcagcactcaacagcaagctctgtgatctcctgctctccaagcatggcatctatgtgcaggccatcaactacccaactgtcccccggggtgaagagctcctgcgcttggcaccctccccccaccacagccctcagatgatggaagattttgtggagaagctgctgctggcttggactgcggtggggctgcccctccaggatgtgtctgtggctgcctgcaatttctgtcgccgtcctgtacactttgagctcatgagtgagtgggaacgttcctacttcgggaacatggggccccagtatgtcaccacctatgcctgagaagccagctgcctaggattcacaccccacctgcgcttcacttgggtccaggcctactcctgtcttctgctttgttgtgtgcctctagctgaattgagcctaaaaataaagcacaaaccac

SEQ ID NO: 115 - DNA, 8280 bp, Homo sapiens
agaggctgcggtgagtccgccagccccagctgctcctcctcaagcccccaaggcccttcggcgggcccctgctgaaagaccggcatgccctattctgtgggcttccgcgaagccgatgctgctaccagctttctgagagcagcaagatcaggtaacttggacaaagctttggatcacctgcggaatggggtagatattaacacctgtaaccagaatgggttgaatggcttgcatctggcttctaaggaaggccatgtgaaaatggtggttgaacttctgcacaaagaaatcattctagaaacgacaaccaagaaggggaacacggccctgcacatcgctgctctagccgggcaggatgaggtggtccgggagcttgtcaactatggagccaacgtcaatgcccagtcacagaaaggttttacacccctgtacatggcagcacaagagaaccacttggaagtggttaagtttttactggaaaatggagctaaccagaatgtagccacagaagacggcttcacgcctctggcggtagccctgcagcagggccatgagaacgtcgtcgcgcacctcatcaactacggcaccaaggggaaggtgcgcctcccggccctgcacatcgcggcccgcaacgacgacacgcgcacggctgcggtgctgctgcagaacgaccccaacccggacgtgctttccaagacgggattcacgcccctgcacattgcggctcactacgagaacctcaacgtggcccagttgctcctcaacagaggagccagcgtcaatttcacaccacagaacggcatcacgccactgcacatcgcctcccgcaggggcaacgtgatcatggtgcggctgctgctggatcggggagcccagatagaaaccaagaccaaggacgaattgacacctctccactgtgcagctcgaaatgggcacgtgcgaatctcagagatcctgctggaccacggggcaccaatccaagccaaaaccaagaacggcctgtccccaattcacatggcggctcagggagaccacctcgactgtgtccggctcctgttgcaatacgacgcagagatagacgacatcaccctggaccacctgaccccactccacgtggctgcccactgtggacaccacagggtggctaaggtccttctggataaaggggccaaacccaactccagagccctgaatggctttacccccttacacatcgcctgcaaaaagaaccacgtccgtgtcatggagctgctgctgaagacgggagcctcgatcgacgcggtcaccgagtctggcctgacacctctccacgtggcctccttcatggggcaccttcccatcgtgaagaacctcctgcagcggggggcgtcgcccaacgtctccaacgtgaaagtggagaccccgctacacatggcagccagagccgggcacacggaagtggccaaatatttactccagaacaaagccaaagtcaatgccaaggccaaggatgaccagaccccacttcactgtgcagctcgcatcggccacacaaacatggtgaagctcctgctggaaaataacgccaaccccaacctggccaccaccgccgggcacacccccctgcacattgcagcccgtgagggccatgtggaaacagtcctggcccttctggaaaaggaagcatcccaggcctgcatgaccaagaaaggatttacccctctgcacgtggcggccaagtacgggaaggtgcgggtggcagagctgctgctggagcgggacgcacacccgaatgctgccggaaaaaatggcctgacccccctgcacgtggccgtccatcacaacaacctggacatcgtcaagctgctgcttccccggggcggctccccgcacagccctgcctggaatggctacacccctttgcacatcgctgccaagcagaaccaggtggaggtggcccgtagtctgctgcagtatgggggctcagcaaacgccgagtcggtgcaaggtgtgacgccccttcacctggccgcccaggagggccacgcagagatggtggctctgctgctctcgaaacaagccaatggcaacctggggaacaagagcggactcactcccctccatctggtagcacaagaaggccacgttccagtggcagatgtgctgatcaaacacggtgtcatggtggacgccaccacccggatgggctacactcccctccatgtggccagtcactatggaaacatcaagctggtgaagtttctgctgcagcaccaggcagatgtcaatgccaagaccaagctaggatacagccccctgcaccaggcagcccagcagggacacacagacatcgtgactctgcttctgaaaaacggtgcttccccaaacgaggtcagctcggatggaaccacacctctggccatagccaagcgcttgggctacatttctgtcaccgacgtgctcaaggtcgtcacggatgaaaccagtttcgtgttagtcagtgataagcatcgaatgagtttccctgagacagttgatgagatcctggatgtctcggaagatgaaggggaagaactcatcagcttcaaggctgagaggcgggattccagggatgttgatgaagagaaggagctgctggattttgtgccgaagctagaccaagtggtggaatctccagccatccccaggattccctgtgccatgcctgagacagtggtgatcaggtcagaagagcaggagcaggcatctaaagagtatgatgaggactccctcatccccagcagcccggccaccgagacctcagacaacatcagcccggtggccagcccggtgcatacagggtttctggtgagcttcatggttgacgcccggggtggttccatgagaggaagtcgccacaacggcctgcgagtggtgatcccgccacggacgtgcgcagcgcccacccgcatcacctgccgcctggtcaagccccagaagctcagcacgccgcccccactggccgaggaggagggcctggccagcaggatcatagcactggggcccacgggggcacagttcctgagccctgtaatcgtggagatcccgcactttgcctcccatggccgtggagaccgcgagctcgtggttctgaggagcgaaaacggctccgtgtggaaggagcacaggagccgctatggagagagctacctggatcagatcctcaacgggatggacgaagagctggggagcctggaggagctagagaagaagagggtgtgccgaatcatcaccaccgacttcccgctgtacttcgtgatcatgtcacggctctgccaggactacgacatcatcggtcccgaagggggctccctgaagagcaagctggtgcccctggtacaggcaacgttcccggagaatgccgtcaccaagagagtgaagctggctctgcaggcccagcctgtcccggatgagcttgtcactaagctcctgggcaaccaggccacattcagccccattgtcaccgtggagccccggcgccggaagttccaccgccccattgggcttcggatcccactacctccttcctggaccgacaacccgagggacagtggggagggagacaccaccagcctgcgcctgctttgcagcgtcattggaggaacagaccaagcccagtgggaagacataacaggaaccaccaaacttgtatatgccaacgagtgcgccaacttcaccaccaatgtctctgccaggttttggctgtcggactgtcctcggactgctgaggctgtgaactttgccaccctgctgtacaaagagctcactgcagtgccctacatggccaaattcgtcatctttgccaagatgaatgacccccgagaggggcgcctgcgctgctactgcatgacagatgataaagtggacaagaccctggagcagcatgagaacttcgtggaggtggcccggagcagggacatagaggtgttggaaggaatgtccctgtttgcagaactctctgggaacctggtgcctgtgaagaaagctgcccagcagcggagcttccacttccagtcatttcgggagaaccgtctggccatgcctgtaaaggtgagggacagcagtcgagagccgggagggtccctgtcgtttctgcgcaaggcgatgaagtacgaggacacccagcacattctctgccacctgaacatcaccatgcccccctgcgctaagggaagtggagccgaagataggagaaggaccccgacgcccctggccctgcgatacagcattctcagtgagtccacaccaggttctctcagtgggacagagcaggcagagatgaagatggctgttatctcagagcacctcggtctcagctgggcagagttggcccgggagctgcagttcagtgtggaagacatcaacaggatccgagtggaaaatcccaactccctgttggagcagagtgtggccttgctgaacctctgggtcatccgtgaaggccaaaacgcaaacatggagaatctgtacacagccctgcagagcattgaccgtggcgagatcgtgaacatgctggagggttccggccgacagagccgcaacttgaagccagacaggcggcacaccgaccgcgactactcgctgtcaccctcccagatgaatggttactcctcactgcaggacgagctgctgtcccctgcctccctgggctgtgcactttcctctccgctacgtgcagaccagtactggaatgaggtggccgtcctagacgccatccccttggcggccacggagcatgacaccatgctggagatgtctgacatgcaggtgtggtctgcgggcctcacgccttctctggtcactgctgaggactcctctctggagtgtagcaaggctgaggactctgatgccacaggtcacgagtggaagttggagggggcactctcagaggaaccgcggggccccgagttgggctctctggaacttgtggaggacgacacagtggattcagatgccacaaatggccttatcgatttgcttgaacaggaggaaggtcagaggtcagaagagaagctgccaggttctaagaggcaggatgacgcgacaggtgcagggcaggactcagagaatgaagtgtctcttgtttcaggccatcagagggggcaagcccgaatcacacattcccccaccgtgagtcaggtgacggagaggagtcaggacagactgcaggactgggatgcagacggctcgattgtctcatacctgcaagatgctgcacaaggttcctggcaagaggaggtcacgcaaggtccacactcattccagggaacaagtaccatgactgaagggctagagcccggtggatctcaggagtacgagaaggtcctggtgtctgtaagtgagcacacgtggacagaacagcccgaggctgagagctcccaggccgacagggaccggaggcagcaaggccaagaagagcaggtgcaggaggccaagaacaccttcacccaagtggtgcaggggaatgagtttcagaatattccaggggagcaggtgacagaggagcaattcacggatgagcagggcaacattgtcaccaagaagatcattcgcaaggtggttcgacagatagacttgtccagcgccgatgccgcccaggagcacgaggaggtggagctgagagggagtggcctacagccggacctgatagagggcaggaagggggcgcagatagtgaagcgggccagcctgaaaagggggaaacagtgaccccgagccgctctccttggagtagcctctcgggaggatcacacctcgacacccaacccctgaaccccacacactctgccatgcacacaggaggagagctggacctgagggccaccgcagcggtgcacacattcctctgggctgacggcatgacctctgtaagggactcctgctagtcccctcttggcatgaatgactgactgtagacgcatgacctccaggcttcaatcctgcctcttgcaatgacagctgatctgtcggaaccaggacacaaaagcagcaagaagcggggagagagagggatagaaaacaagcgcaggagagcctgcgaacgcaaaagtgaatgagggctttttgtggctggggatgggttttggttttggggttttttttttaaattgttttgacttcgtacagggtactttttcccaacctcatctgtcagaaatccatgtgggcttcctggaaagaaaaaaaaaaaaaagaaaactaggcatgaaatcagtttaacaccttaatcttaagccatgtcctcatctgcccaccctccccaacccacatacctccattccacttgtgacaccccctcgactccctggtgacgctcctcccagatcgctctacatgacattcaggacacacacacacacacacacacacacaccactcgcctccactgaatctacacacagattttactgtgacttctgaagctgtggataaattggaattttttatgttgtctctctctctgccaatttcaatacgaatcatcttccaatggaaaatcattaccttgaagagtgcattcggggttccttgtgttagggacttaagaatctgaggcgcgaggacccccaggcttacctgtaggactcaaagggagccaggaccccatctgaaagggtctcctctctcagttgggggacaggccggtggctgacccaggattgcaccagcatgtccatagagaagaggttttctatgtcttcaagcactatatcatagtccgtgttcaaagtgtaaactgtacagtaatcagccttgtgtatatgaaaaacaataaatactatgcaaaccaatagaaacatttagcagtacgtacagagcctgacagcgcagctcctgaggacttctgcggctgcaggagaaggagctgtggcctgtctttcagtgaaagaggaaggaaaggagtagggctagtgaatgtatctgccaggtcttagaagtcaggaccacccagggtctcccagagtgaacttggtgctctaagtccaggcagcctgcaggctggggaccctgggtgcaggtgccaggctcgaggctgttccctgtcctgcctcagtgcctcccctctgcccagcccctgtggcctcttggagaggcgagccagggggctccccggaccgcatggccggtgagagtagagtcggaggcggagagcctggacgcccagaggccggggccaggctctgggtcaaggcaggaaggagacagacagctggcagttcctcgcctcggtgccatcagggaggagccttaagttccactagagcctccggcccagggaggccagaatcagcacaatcccggccccgccctcgcggcgggcgcccccagggccaggagagagagacagggctggctcctctcgcccctggagccgcggtgtggacggcccggccccgtccgccccgccgctctgcgggagtgtccttcgggacacacttaaaccttccaagtagcacagaagccccctccacgtcagagccccctggccgcggggcctgtgagcggagaggggccctgcttcccacacaaatccgccccggtgcacccccggccaggcaggccccggggcggcctaggcgccttgtcggccgggggtggggctgcttttgcttcctttagaggggcgggcagggagaggaagctctagctccgggcctgagtttccccgaggctgcgtcggaggagctgcagggcgagcccggacggctgccgtctccgccagaggccaccccggcccggcctccaggcagaggcgcccccctccatcctcccccatcccgggggccacggcaggggggccgcacagcgcggctgggaccgattcggtgacggcccaaggaagctgggcgcagggctcgcctctcccgcctcgatcctgcaccttcctctcccaggtcgctgctgcagccaacccagtagcccccttagcgcccccgcggaccccgcagctccagactccgctttggcacctctgctccggctggcatggctgcacgctccggctgctagtaggagccgttaggggaggagtttggggtctccacacgatgcctagagaatgctgcagtctgcacattagacgctttttagaagttttgaaattaccttgatttttttaattgttatgaaaatggatcttttcttgactctcccacatgctctgttatgggagagaatcccctaccctactctgatgtatagaccattctcccttcaccagccgaaccaatgtcaaaattaataaagaaatggactaaggca

SEQ ID NO: 116 - DNA, 7207 bp, Homo sapiens
ggccgcgtcgaccatgaaaaagcggcggcggcgggagagaggaggaggcggcggcggggcagtgaaactacggtagctgccccctgagctggtggtgtggctttgtggggagggcgtagttcctaatcccctttccgggcagccgccggggctcggggctgtgagcggccgtgaggctgcctccccgggccccctgcctccgccatgttccgcagggcacgccttagcgtgaagccgaatgtcaggcctggtgtaggcgccaggggctccacagcttccaatccccagcgtggacgggagtctcccaggccgccggagcctgccacggactctgcttccaagcccgcggagcccacagatgtgcccacagtcgatttcggtggagcggagccccaagaaaaggctcctaggagcagtactgaaaagactggtggtgacaatgatgttgaagaatccagtagatcttcctctactgtttcacagagaagaaagcgaatatcaagtacttctagcctggttaagtctagtgtcagtgttccttcagaatctcatcccttatctacaattaatcaagaggctccacagccaactgccacttcaacaaaagagaaacagccatgctcagacagataccgaatatacaaagcccagaaactgagggaaatgttaaaagaagaattgagaaaagagaagaaacaatggaaaaacaaatatgctataaatgaaagtcagaggccaccagatcgttcaaaaatgactatgagagacttcatatattatctaccagataataatccaatgacttcttcactggaacaagaaaagaaaactgaaaagccatcgactccagtccagacaagagagcaagaaggtaagagtactcctaatgctgaagataatgaaatggaagaagagacagatgatgggccattactggttcctcgagtaaaagtggcagaagatggttccattattttggatgaagaaagtttaactgtagaagttttaagaacaaaaggcccttgtgttgttgaagaaaatgaccccatatttgagcgcggttctacaactacatactccagctttaggaaaaactattactctaaaccatggtcaaataaagaaacagatatgttttttttagccatcagcatggtaggaactgacttttctatgatcggacaactttttcctcacagagcaaggatagaaattaagaataaatttaaacgggaagagaaaacaaatggatggagaatagacaaagcattccaggaaaagcgcccttttgacttcgatttttttgctcatttgcttcagaaagttcttgctgaagaagagaaaagaaaacaaaaatctgttaaaaatcacagtttaaaggagaagaaatccaccaaaccacggaaaaatgtaaaagtgaaaaaagttgcctgtgaaggagtgaataatgatccagatgagtctatgagttctagaatttcagacacggaaagatctcagaaggatgctcagacagttgaagaagagtctctgaccttatcaagggaggatgcagagcaggttgcattagaagtagacctaaatcaaaagaaaagaaggaggaagaagcaagatggagctaatgaactgggagtaaacaatcttttagaaaatgccactgttcaggcgggtccttctaaaggagaaaaacacaagaataaatgtcaggctataaggcctgagctaaaggaaggtgaatgcagtaaggagcagatgctttcctgcacacaaaacatagatggcattgtgggttttgcctccactgaaaaagttgagaaaagaactgaccccatcctttcattaagtaatcaacaagatgccacatcagtagcaactgagtcttcagaatcaagcacttcagatttgccttcattcgaagttggaattagagcattgtgtgaggtgaataatgctgagggtagttgtatagaagaaagaaatgttgacctaaaaaataattcactggaaattgatcaaacagaaaatgttaaaccaatgttgagaggtcgcttccaaagacctaaacccaatttgtcaagggctgggaagaaatcagttctttcacaaggcaaaacagagtcagagagcaagaattcacattcaaaaacttcagttgaaaagaaccacgtggaaaaagataaaatgaatacattggacattttgagaatggagactacagagagagagaatccagaagctgaaactgtatctgttttgggtgaaaaaaattgtctgcaggaagggagtcaactaaaggctttaagacctgtacaagtgaggggccgattgcaaaagccaaagccaaatgcaggtaaagctgctgaaagaaaagaaattctcatatcacaggaagaaattggggccaatgtagagaagaatgaaaatgaatcctgtgctgatagagatactcctcaacacatggaagatcaatcgcgtaaagattttgaagaggaagatgtcatattacagcctgagaaaaatgattcttttcaaaatgtgcagccagatgagcccaaggttcttaatgaatgtctaagcgttcaagagaataataaggcaaataaacttaaccaagtcccaattctaaggactcgatttcagaaaccaaagccaaatataggaagaggaactggaaggagagaaatttcctcaaaggaagaggtactagagaagattcttgtctctggggaaatggcggcagcattgagagaaactgtaagactagacacctcaccaaaggagatggtaccagcagagattaatactaaagaaatgcagtcagatttaaaagaaactggaagaagagccatttctcccagggagaagattctagatgtgattgatgacaccatagaaatggagacaggtctgaaagcaatgggaagagagatttgtctaagggagaagacgccagaggtgattgatgccactgaggaaatagacaaagatttggaagaagctggaagaagagaaatatccccacagaaaaatggcccagaggaggttaagcctctaggtgaagtggagacagatttgaaagcaactggaaatgagagttccccaagggagaagacaccagagggtactgatgccactgaggaaatagacaaaaatttggaagaaactggaagaagaaaaatatccccaagggaaaatggcccagaggaggtcaagcctgtagatgaaatggagacagatttgaacgcaactggaagagagagttctccaagggagaagacaccagaggtgattgatgctactgaggaaatagatttggaagaaactgaaagagaagtatccccacaggaaaatggactagaggaggtcaagcctctaggtgaaatggagacggatttgaaagcaactggaagagacagtttcccaagggggaagacaccagaggtgattgatgccattgaggaaatagagatagatttggaagaaactgaaagagaaatatccccacaggaaaatggcctagaggaggttaagcctctaggtgaaatgcaaacagatttgaaagcaaccggaagggagatttccccaagggagaagacaccagaggtgattgatgccactgaggaaatagacaaagatctggaagaaactggaagaagagaaatatccccagaggaaaatggcccagaggaggtcaagcctgtagatgaaatggagacagacttgaaaacaactggaagagagggttcctcaagggagaagacacgagaggtgattgatgctgctgaggtaatagagacagatttggaagaaactgaaagagaaatatcgccacaggaaaatggcccagaggaggtcaagcctgtaggtaaaatggagacagatttgaaagaaattagagaagaaatttcccaaagggaaaaggtgctagcagagttcagtgctataagggaaaaggagattgatttgaaagaaactggaaaaagagacattcccatcatggagaaagtatcaggaaagatggctgttgttgaagaaatggaggcagatttgaaagaaactggaaaagaaaattttagagagagaggatctgaagagatctgtgttactgaggaaaaggtggcagaattgaaacaaactggaaaaacagacatttctccaagggaaaacgagctagaggagaccagtacctcaagacaaactgacacacatttaatgcagagcggtagcaatgacttcagtgctatgccttcactagatattcagaacattagcagtgaagtactgtcgatgatgcatacacctgtagaagaaaaaagaaattctgaaaaagaagtatcaagtcacttcagtcatttcaagatttcttcacagactcatgaatctgataaaacagaagtccaggggattcaatctccagatgttccagagcagttttcagatattaatttaagcaaatctcttcctcaagaacagaagccacttgaaattaaaccagcaccttttgtgaggagccgattcaaaagaccaaaaccaaacttagcaagagcagctttgaagagagagactacagaatcagaaaaatatatatatgagaagaaatcagaaaccaagaaaatggagactattgtgatgcaagaaaataatgaacaaactgatactctcccttctcaacatgatgaagcttccctaatgatatcaagagaaaaagacacattaggtcacaggaatgaggaggctgtgatattgccatgtacacagactgaaaggaacctttcaccttcaaattcttgtgaacctaaagaggagtctcagtcagcaccagtccagaaaaatgactcagttgtttctgtggggactaataatgtaaacactttccagcaagaaatgaaggaaagtgttatccaaactgctcgacaagtaaggggccgacttcagagaccgagaccaaatataagaaagacaggacagaggcaaatagtagacaaaggtgaagccaaaggcataattaaggaaggaagaacgatattaccaaaagatgaaactgaaaagaaagtcttaactgtgtcaaattctcaaattgaaactgaaattgaagttccatcgtccgcagttccagaacacagaatgtatgaaaatcaaagtcaggtggttcttgtagaaaaccttcatgttaacaaaacaaatgaaacaatcagacatgaaaataaaccgtatgttcctagttcagcacaaatgacaagaaggaaattccaaaaggctaagccaaatttgggaagagcacacagtaagaaagaggaaccagttttagaaaaagtcacaacagatcagagcaaggaaggcaagccagaagatcatttgctgcagaaaggagcttccaacacccagctccttctaaaagaaaaagctgagcttctgacatctctggaggtttcagcaagaaaagattgtgtaggttccaaagagtctgctttggcaaaaatagatgcggaattagaagaagttggaccatcaagaagggttggagaggaaactgtaggagataattcaccatcttcagttgttgaagagcaatatctcaataaactaacaagctgtccacaaccgttaaacgaaacaagttactctaaaattgccctggatgggaaaacaactatctcttctacatctgagtatgagagaaatcgtggtgaaaggagaagtcataaaaagttcaaaccaaatgtcaccagaggtcgtggatcaaaacgagttcggggtaagacctctaagaaggaacctagagcttccaaggccatgctggtgactcttcgggcttcccaggaagaagatgatgatgctgacgattttgagtctgactatgaggaagaaagctatcatcttgctcccgaagaagtaaacaaagctccagtatttgtacctgttggtctcagatctcctgaacctgtttctgctcagattgaggaaacaatggaagagcttgaaataactgtgaatgtcccagatgtaggatgcatagctgttgttgaacatgagctaccaaacacagatgtgactactgaagaaatgaaacaagaagaaaatttgagtgtaccgtttgaaatgaccacaagtgaacatatccaagatgaaccaggtaccaatgatggaagcaccgaagctgcaataactttacttacaatgggagatctagtattgcagtcagagatcagtagtgaacagggtgatgtaggagtatgtatacttcctcatgttcattcaaaggataaaagccatattccttctagcctagataatgtaaatcacaaaattgttcatgaatgtcaggaactttcttcacctgtcattactacatctcctgcatcatttgaagaaaacaagattgtattggaggaacaaagttccagagaagaaataagtttaatggagaaagtaaaggagaatgctacaccaaccaggaatacaatttctaaagtgaccagtaatttgagaataagaagtaggcttgctaagcctaaaccaaatcttgagaagactttagggaccaacaggcttgatgattatcaggaagtttccagtttgtgtgtaaccaaaggggcagaaatggaaactcaaagagaaacagagaaaaatgcttccaaagcaacagaattggaaaataaaaaccttggaccagttacaacagcagagaataaggatcagagcaaattggcatgtgtacatggtatcaaagggaccagtatttcttcagaagtaaacctaactgaaagaaacgaaaatcaagaagagagctctcaggaggttcacatgttgtcagttgctccagttgcttcctctgagacagggccctgcacacttggtttggataggggtcttggtgaaaattctgttgaagagccccagataaaggactctaaaggagacagtgtgcttacacttcctgtgccagaggtaaaagaatgtacagtataataagggatagcaaggtgttttcctccatttaaaaaaaaaaaaggtataatttacatacaataaacttcacctcttttatcttcatttttctttatttcttcttttttttttggagacagtcttgttctgttgcccaggcaagagtgcagtggtatgatctcagctcactgcagcctctgccacccagattcaacagattctcctgcctcggcctgccgggtagctgggactacaggca

SEQ ID NO: 117 - DNA, 1264 bp, Homo sapiens
gtggtacccagtcctcaggtgcaaccccctgcgtggtcctctgtggcagccttctctcattcagagctgttttccacagaggtagtgaaaagaactggattttcaagttcactttgcaagagaaaaagaaaactcagtagaagataatggcaagtccagactggggatatgatgacaaaaatggtcctgaacaatggagcaagctgtatcccattgccaatggaaataaccaatcccctgttgatattaaaaccagtgaaaccaaacatgacacctctctgaaacctattagtgtctcctacaacccagccacagccaaagaaattatcaatgtggggcattctttccatgtaaattttgaggacaacgataaccgatcagtgctgaaaggtggtcctttctctgacagctacaggctctttcagtttcattttcactggggcagtacaaatgagcatggttcagaacatacagtggatggagtcaaatattctgccgagcttcacgtagctcactggaattctgcaaagtactccagccttgctgaagctgcctcaaaggctgatggtttggcagttattggtgttttgatgaaggttggtgaggccaacccaaagctgcagaaagtacttgatgccctccaagcaattaaaaccaagggcaaacgagccccattcacaaattttgacccctctactctccttccttcatccctggatttctggacctaccctggctctctgactcatcctcctctttatgagagtgtaacttggatcatctgtaaggagagcatcagtgtcagctcagagcagctggcacaattccgcagccttctatcaaatgttgaaggtgataacgctgtccccatgcagcacaacaaccgcccaacccaacctctgaagggcagaacagtgagagcttcattttgatgattctgagaagaaacttgtccttcctcaagaacacagccctgcttctgacataatccagttaaaataataatttttaagaaataaatttatttcaatattagcaagacagcatgccttcaaatcaatctgtaaaactaagaaacttaaattttagttcttactgcttaattcaaataataattagtaagctagcaaatagtaatctgtaagcataagcttatcttaaattcaagtttagtttgaggaattctttaaaattacaactaagtgatttgtatgtctatttttttcagtttatttgaaccaataaaataattttatctctttct

SEQ ID NO: 118 - DNA, 2295 bp, Homo sapiens
acacgccgcgctgaggcccgcgggcccgtcatggaggcgcccaccgtggagacgccccccgacccctcgcccccttcggccccggcccctgccctggttccgttgcgcgccccggatgtggcgcggctgcgcgaggagcaggaaaaggtggtcactaactgccaagagagaatccagcattggaagaaggtagataatgactataatgcccttcgagaaagactcagcaccttgcctgataaattgtcttataatataatggtaccatttggcccttttgccttcatgccaggaaaacttgtccatactaatgaagtcactgttttactgggggacaactggtttgcaaagtgctcagcaaagcaggctgtaggtttagttgagcaccggaaagaacatgtaagaaaaacaatagatgacttaaaaaaagtgatgaaaaattttgaatccagagttgaattcacagaagatttgcagaaaatgagcgatgctgcaggtgatattgttgacatacgagaagaaattaaatgtgacttcgaatttaaagcaaaacaccgaattgctcataaaccgcattccaaaccaaaaacttcagatatttttgaagcagatattgcaaatgatgtgaaatccaaggatttgctagctgataaagaactgtgggctcgacttgaagaactagagagacaggaagaattgctgggtgaacttgatagtaagcctgatactgtgattgcaaatggagaagatacgacatcttctgaagaggaaaaggaagatcgtaacacaaatgtgaatgcgatgcatcaagtaacagactctcatactccttgtcataaggatgttgcaagttcagaaccattcagtggtcaagtgaatagtcagttgaactgttcagtgaatggttccagttcttaccacagtgatgatgatgatgatgatgatgatgacgacgacgacgacaacattgacgacgatgatggtgataacgaccatgaggctttaggggttggagataattctataccaacaatatatttttcacatactgttgagcctaagagggtccgaataaatactggaaagaataccactttaaaattcagtgaaaagaaagaagaagccaaacgtaaacgaaagaacagcactggcagtggccactctgcccaggagctgccgaccatcaggacgcctgcagacatttacagagcctttgttgatgttgtgaatggagaatatgtccctcgcaaatccatcctgaagtctcgaagtagagagaatagtgtgtgtagcgacactagtgaaagcagtgctgctgaatttgatgataggcggggagttttgaggagtatcagctgcgaagaagccacttgcagtgacaccagtgagagcattttggaagaggaaccacaagaaaatcaaaagaaacttttgcccttatcagtaacacctgaggctttttctggaactgttatagaaaaagaatttgtatcaccttccttaacaccacccccagccattgctcatcccgcactacccactattccagaacgaaaggaagttctgttggaagcatctgaagaaactggaaagagggtttcaaagtttaaagctgccagattgcaacagaaagactaggccctgtctaggaaatgggaatttacatcctaaaacctagttgttcatttgtttagagtatctatagcaaaataggttacatgtagtttgaaataaggtatcctgagttactttggcaacaagttcttttacccttacccgtggtatttgaaaaaaatcaaggtaactgtctgaatactttaatatcagcttgttttgtgaattctctgaatactgtcaacactcttatctaagtttgcctttatgatgcagtggcagcattttgaattacttttcaaagaatactgttcatatgcattgtttttgtgtttcaaactaaatacaggcagttttgtgccagctgtgatattgtgcataccatatggaccattttaaagaaaattttaaaatttcaaatagattcaacaattacattacttgctttcacattttaaaggcactttaaaaaaatctacttctcttgtaggttttgcggctagttggctattcaagaaacctcgcccctctgaatgtcatactgtaatctttaaggaagaaagctacatgaattaattgtactctatgggaaaatttctttggaaagatattttgtaaaacttttttttccaagtaaaaactttatgaaacttggtctcaaaaaaaaaaaaaaaaaaaaaa

SEQ ID NO: 119 - DNA, 2745 bp, Homo sapiens
gcgcatgcgcgagtgtacgcgttgccggcgaagaggggagcctgacgactcggaaatttgaataccacagtagcatggagtgtgacctcatggagactgacatcttggagtcgttggaagatctaggttacaagggcccattgttggaagatggagcgctctctcaggcagtctctgctggagccagttcccccgagtttaccaaactctgtgcttggctggtgtctgaattaagagtgctctgtaaactagaggaaaacgtgcaagcaactaacagtccgagtgaagctgaagaattccagcttgaggtgagtgggctactaggggagatgaactgcccgtatctttcactgacatctggggatgtgaccaagcgccttctcattcagaagaactgcctcctcttgctcacatacctcatctcagaactagaagctgccagaatgctctgtgtgaatgctcctccaaaaaaagctcaagaaggaggcggtagtgaggtctttcaagagttgaaaggcatatgtattgctctaggaatgtccaaacctccagccaatataactatgttccaattcttcagcgggattgaaaaaaaattaaaggaaacattagcaaaagttccacctaatcatgtgggaaagcctttactgaagaagccaatgggaccagcccactgggaaaagatagaagcaattaaccaagccatagccaatgaatatgaagtccggagaaagctgctaataaaacgtttggatgtcactgtacaatcctttggctggtctgacagagctaagagccagacagaaaaattagccaaggtttaccagccgaaacgttcagtcttatcccctaaaactactatttctgttgcccatcttttggctgcaaggcaggacttgtcaaagattttaaggacaagcagcggctctataagagaaaagactgcctgtgccatcaataaggtgttgatgggcagggtgcctgacagaggtggtagacccaatgaaatcgaacctccacccccagagatgccaccgtggcagaagaggcaagatggcccccagcagcaaacaggaggccgaggaggagggagaggtggctatgaacattcctcatacggaggacgaggaggtcatgaacaaggaggcgggagaggtggacgtggtggctatgaccatggtggccgagggggaggaagaggaaataagcatcaaggaggctggacagatggagggagtggtggaggaggtggctaccaagatggtggttatcgagattcaggtttccagccaggtggctatcatggtggccacagcagtggtggctatcaaggcggaggttatggtggcttccaaacatcttcttcatatacaggaagtggataccagggtggtggctaccagcaggacaatagataccaagatggcgggcaccatggtgatcgtggtggtggtcgtggtgggcgaggtggtcgtggaggccgaggtggtcgtgcaggccagggaggaggctggggaggaagagggagccagaattatcaccaagggggtcaatttgaacagcatttccagcatggaggttatcagtataatcattctggatttggacagggaagacattacactagttgaggctaccgaaccttacattttgctagagctcaagtaatagaaacttagtttcagaatcctgaattcagcacctattttgaattaatgtgagaccacaggtggcaggcagattcctgcttggcataagcatttgtaggtcttcattcaattctgttagatttttttattggacttacataatgccgtttatttgagaaacacataacatctctcctttctatgaaaaattttttaaaaggtggttaaaattgcctttaattgcccagtagactaattccacagtcagaacatgcaaacttttttgaagaaattacttgaataagtagttttcatgttttcaatatgcagttttgaaaatgaggattcacctagacttttttagatttactactaggaaaccttcctcatatgaataaccatttatatgtgttttgcttaaagtattccaatgcctattttccaagcacagttctgccccccggttgacttttatgccacgtgtgcttcatgatggaacttttaggtcagttcctattaaatgagctcttctgcagatagcacattcagtagccttattttgttgatggaatactgtatcatatgctcaactctgaaaaccttgaacacggccaaaatccataaagattataaaagcaaactaagttgtgaagctatagtacatgtaggcatttagttaagtatagcaattcaaactgacctgcatccatccaaaacaaattcctccttcaaccttatttttacttgaaatttgctagaagaaatagcaaaccgaaatttgttttatgcatgagttaataccactggctcagcaaatacaagttagtttgctttaagcaggtaactttttttgtaatggaagaaatgcactacaaagttaagacagatttttgctaagtgcaggaggccctttattattgctgcagaaaacaaaagcctggctgagttgatgttttacattctcccttactgaaatctacatgacatgatgcttcttgctgggtttttgtacatgtaaacattgtcaagctgtgaaagaaaatggctggaggtgtgctttgtgtgaaaggtgagcaataaagtatctgttaagttc

SEQ ID NO: 120 - DNA, 2727 bp, Homo sapiens
cacgagaagacaggaggaagaaagggagagagggccaggcagtcgcactgtgaacagaacaggagaaggcgaagcggggcaaagttccctgcccaccgacgccagcctgcttggatgacttgcctcgtttcataattcacttactgtctgcaccagccggcctcagcctggctggaccctgctgcctgtgtggcccggagccagaggcccccacactcccagctgctcttctacagatgccatcaacgagcaggactctgggtggctccactgtctaagcctggagagtcaccgccgagggatgaggacgcgccagcccgggggaacgcgccagctgctttcgcggccccaagcgcgcagtgcccagcagccgcgccgagcctgacacgctgtcctctcccctcgcgcacagggctctgcgagtgacccggcgggcgagctccgtgctgcatggaacggctgcagaagcaaccacttacctcccccgggagcgtgagcccctcccgagattccagtgtgcctggctctccctccagcatcgtggccaagatggacaatcaggtgctgggctacaaggacctggctgccatccccaaggacaaggccatcctggacatcgagcggcccgacctcatgatctacgagcctcacttcacttattccctcctggaacacgtggagctgcctcgccagcgcgagcgctcgctgtcacccaaatccacatcccccccaccatccccagaggtgtgggcggacagccggtcgcctggaatcatctctcaggcctcggcccccagaaccactggaaccccccggaccagcctgccccatttccaccaccctgagacctcccgcccagattccaacatctacaagaagcctcccatctataagcagagagagtccgtgggaggcagccctcagaccaagcacctcatcgaggatctcatcatcgagtcatccaagtttcctgcagcccagcccccagaccccaaccagccagccaaaatcgaaaccgactactggccatgccccccgtctctggctgttgtggagacagaatggaggaagcggaaggcgtctcggaggggagcagaggaagaggaggaggaggaagatgacgactctggagaggagatgaaggctctcagggagcgtcagagagaggaactcagtaaggttacttccaacttgggaaagatgatcttgaaagaagagatggaaaagtcattgccgatccgaaggaaaacccgctctctgcctgaccggacacccttccatacctccttgcaccagggaacgtctaaatcttcctctctcccccgctatggcaggaccaccctgagccggctacagtccacagagttcagcccatcagggagtgagactggaagcccaggcctgcagaacggagagggccagagggggaggatggaccgggggaactccctgccctgtgtgctggagcagaagatctatccctatgaaatgctagtggtgaccaacaaggggcgaaccaagctgccaccgggggtggatcggatgcggcttgagaggcatctgtctgccgaggacttctcaagggtatttgccatgtcccctgaagagtttggcaagctggctctgtggaagcggaatgagctcaagaagaaggcctctctcttctgatggcccccacctgctccgggacggcccccttacccctgctgcttcagggtttttccccggcgggttgggaggggcaggaggtggggtggaaatagggtgggctcctttcctcaggtagagtggggggccaaaacctctgcagtccccggcagtgagctatggactttcttccccctcacgaggctgggggcctcctgctctcgtccctggccctccctgtacagggcaaagccagtctgggctctggcacacagagttcatgtttgccgccctctccctgcccctcaccccagaggtgagaggaatgaggggcattggtggttaggccggttggctgtcttgaacagctggagggaagatgcaggggtgggaagcggccaggcagaaagagctccaggctcttgtgtcgcccacccagccctcccatactcactcctgacagctttcctgcactgcagcttcctgctcctctgactctagtgggaacaggccccagctcagcctccgcgagggaggtcacccctccacttcagcttgccctgacctccgctcgcaaaccccgagcttccaagccttttgctccagccctgcggcttccccagaagcctgggcttagggtggagatgccgcctacccgatcctggccctccacctgcctccaggccacgaaatgggaattccagcactaagccaggcaccgggcagaagctgggccttccgcctcccttggatggggtcaagaggccaggcctggcacattttggagtgtcctggctaccagctctcacacctacacccacgcaccccctcacacactatgctctctcaagaatgtaatttattggggcccccccagctgctttcctcacctgcccctgccctaccttacacccccagcttgacttctttccagtccacgtggatataatgatatctatatttttgcccaggtctgggtattgctcctgcccagaccctgacatccctttccactgtgtgtgtgaccatgctgggggagggggactctgcttggaattaaaaggttgctttgggtcccta

SEQ ID NO: 121 - DNA, 5695 bp, Homo sapiens
gcggctcaggggcggggacgggggcgtggtcccgccgtataagaacggagggggcggcggcgggacggctcactcggtgccgctgcctaggggctgtagaggtcgcgccgctcctgctggggcctgcccacgccaaggacctgcctctgtcgcctcctcttctattgcccagtttccccagccagaacatcccctgaagatggcagaggagagcagctgtaccagggattgcatgtccttcagcgtgctcaactgggatcaggttagccggctgcatgaggtcctcactgaagttgtacctatccacggacgaggcaactttccaaccttggagataactctgaaggacatcgtccagaccgtccgcagtcggctggaggaggcaggcatcaaagtgcacgacgtccggctgaatggctccgcagctggccacgttttggtcaaagacaatggcttgggctgcaaagacctggacctaatcttccatgtggctcttccaacagaggcagaatttcagctggttagagatgtggttctgtgttcccttctgaacttcctgccagagggtgtgaacaagctcaaaatcagtccagtcactctgaaggaggcatatgtgcagaagctagtgaaggtttgcacggacactgaccgctggagcctgatctccctctccaacaagaacgggaagaacgtggagctgaagtttgtcgactccattcggcgtcagtttgagttcagtgtggactctttccaaatcatcctggattctttgcttttcttctatgactgttccaataatcccatctctgagcacttccaccccaccgtgattggggagagcatgtacggggactttgaggaagcttttgaccatctgcagaacagactgatcgccaccaagaacccagaagaaatcagaggcgggggacttctcaagtacagcaaccttcttgtgcgggacttcaggcccacagaccaggaagaaatcaaaactctagagcgctacatgtgctccaggttcttcatcgacttcccggacatccttgaacagcagaggaagttggagacttaccttcaaaaccacttcgctgaagaagagagaagcaagtacgactacctcatgatccttcgcagggtggtgaacgagagcaccgtgtgtctcatggggcatgaacgcaggcagactctgaacctcatctccctcctggccttgcgtgtgctggcggaacaaaacatcatccccagtgccaccaacgtcacctgttactaccagccggccccttacgtcagtgatggcaacttcagcaactactacgttgcccatcctccagtcacctacagccagccttaccctacctggctgccctgtaactaaccttgagacctgagggtttccacagtgggaaccccaatagggctagggctctcaggtaggggagcctccttctagatgtaggcatttggcttttaaaggggaactcagctctgattctgcttttttttttttttttcctttgtgtacccattggaatgggtctacagtgtatcatgagccaaccctcaaaggacccgtattacagtgccacgttggaaaacgctacaggaagcatgacctatccacatctttccaagatagacactaacatgtcatgtcccaaacattagcacgtgggggttgagctctgtgcagtaatcgagattgggagaatttgggcagcgcgtgagaagtgctaagctacttgttttctcacttgagcccgggtaggctgtgttggccctcacttgggattctcagcagttacatgaaagttgtgctgataatctcttctcttgtaccaattttagtcaggcagaaaatggtaaacatgagggtgctcttgtgacttaatttttgttcaagggactaaattgcttatgtttattccctgtcagcggagtggagaatgtcattcatcaataaaccaaagccaatagctggagaattgagatctggttgaaagtggtttatggtttacatgctgtactatcctgaggaattgcgagatattgctgaggggaaaaaaaaatgaccttttcttgaaatgtaacttgaaaacaaaataaaatgtggaacataatgtttaattagaattgtggtggtggtagtggaaggggataattgtaaataggaaacatgaatgttcatttttttctttaaagaattcttattaaatggctccctgccttttttttcttttttcctcatcagctctttcatggctgaattttgttttattcttcctaagactgaggattgtgctgagtccagagtcattgtggtaactgacatgagggtcttcccatgttttaactggaaacccactttggtcacattccaagtatgacacagctgttcttctggagtactttagctattttttgtttttgttcttttcgttttttttttttccaaaaatagtgacttccttctccaggtgtgtttgacagcaactcaattcaggaatttcggtagaactgagtgacctgtggaactgctttagaatctaacctgctgtcttcgtgctctgtgtgaaggggaagctggggggttagcatgaagtctggccttgtgtgcattggagcttccaaggcactttgaaatcattccagtatatttgggaagaattgagtgaatgagaatgctcttccttattctggtagatttgacttgtttataattctgcactttagaagaaaaacagtgttaatctgtagttgaaagaaagcttagtagatgagagagttctaggctactgtggctttttccagtagatttagatgagattatgtgttttgaaatgttttgtgggatcccttagaaagcatcacttcagggcagagacactcaatattgccagccagcttgggttctaaagtgatttaatcaaattcatgctcctgatcttttttttcccccttcctttggctatgaaaacccaaagcccggagtgattgttttctccttgctttaagcagtgaagttatcctaatgcaaaagagcttagtagaaaatgagtggtttacctttttttctaaaagtatattttcaagtttattctggaatgtgatgtcttggtcctcttaaaagcagatcagccatgactgaaactcaaggcttagctggtatctatgttgtgctacattaggtgactagaagccacttcttagtgtaatcagctcctgtttccctgtgagccttagttatattttaattcagtggctttgagtcaaggccggttctaattgaggggacccagtgtgcttcagtgttaagagtggggcaatgaagagtgaaccccaatgaagagtgatcccaactttggaaactatctggtcattcatgaccttaaaaagctgccatggtggtcaaatggcatgtgtttgcacaaaaatgaccgatgtgtttaaccaaagctttgaaatgtgatgaagccaccaacataagcacttgcctaacagaaatcagtatttcttctacttagaaggcttggggcccagggtaatgaggcaccagatgaagataagatctgcatcaaggaattaaatttccagtttgtccttggggttctttctgcttatgttttttcccccccatctggtaatagtcctcttctgagaatgaaaggaggcacagaagttgcgagaaagacccagtccccagtctttgccaccattgcaccatggttgtctcggagtcccttcacctgacctttttagtcagctcagatctttttgtagtttgagaatagacctattcaagagctatcagggttaaaagctgcactgaccaaagctgtacttttaaaacacaacccctgggctagtgatgtctctacttgctctatgagccttttgccagcctcagaataggcgaggtaaccttgaatttcagggccctggaaactctagctgaaacctgcctttcctaatgctcacacaagcaccaggtaccctgagcttatactgagtccagtggttcctattttatgtgtgtgtgtatgtgtgtgtgttgagtaacatgaaacttggcagtagcagagagcactgaagttcacatgcaagttctaatctaaagttaagcagtctcttatttgtttcgggactctgatttgactctttttctgatgctttcggcatgtctgcagcctgttctcctagcctgctgcttggagtcaggttgagcatcagtgagatgaagacagtaccttttcctctcacattggcagaatagcacgcactagatgcctgaccttgagctctagtctcccctttaaatcttaccttggcagtaacacattattcctcattcaataatttcaatgctgaaactgaactctattactaatgccttccaatcagagttcctgatggggatgcctgtgggatggcccacacctgggggacctggcagatggggtgagttgggtaaggaagatgatgcttagttcctgatagatgctacagatgtagtttggcatttcagtttttgtccagtttgattttcactggggtttgagtcacagcaagctgtgtatgaacttgtgttttgtggtgacacattaataatcaaattgctaaaaccctgaatctgcttattcttcagcttcacctctgcactaaccccttacccttatggtacgtcaggattttaactagtactgctttgttgactttgggaaatggtgccactcaaaagcaacttcctaacttgaggaataactcctttgtagtttactttctggtactggttggtgccttgtattgggatacagctatattcttagctcaaatgtcctctttttgagagcaaagtagttatccaatggtgagacgagaccctgacgctcatagaggccattccttcctgggtgtcggaccagggctctgtgtcagggaaaaccttctgggtggactttgtaagaatccagtttccaaggttagattcacatccttaatcttgcagagactagaatttcacagctcgctttggaacatattccaattcaaccagttaaaatcagaggaccaagtcgtgggggaggggggcggtgttgaggagaggtatttttaaagatctggcaacttttcaggattatttgtggagaactctaaggttaagatcaggaaataaaagactgtgtgtgtgtgtgtgtgtgcgtgtgtgtgttcaagtgcctaaatcttgtttacctatcactttaaaaaaataattgaagtgtaagctaaataaaatgcttggagttttgcctgggctagtgagagttggtgcaaattcttgtgtgtgtttgcataggaaggtgagatgaccatctactaaagaggaagtagctaaatacagatctgtgggtgtttttaaaaaaactcaacctatctggtgttttattttaatggataaaaatgtaatttttctaaggtagcaacttatttccaaattaatatagatgaaaaatagataccaattagactaaattgaaagctttttgttctatatttgcatagcctttgaaatatttcttagtgcctaggaggtctggggattcctctttcgtggtggtcactaaccttacttgatgcagataaaatcacttgtcaatgcaaaatgtgttagaacttgataaagctttgagtttgagaaataaaggtatatttaaaattt

SEQ ID NO: 122 - DNA, 1531 bp, Homo sapiens
ccggcccacgccagctcccggccgcggcacagcagccccggcgctccccgcgccgccccgcgcaggcgcccccgccccgccgtcgccgccgccgcagccaggagccgctgcaccatgccccgcatagatgcggacctcaagctcgacttcaaggatgtcctgctccgacctaagcggagcagcctcaagagccgagccgaggtggatcttgaacgcaccttcacgtttcgaaattcaaagcagacctactcagggattcccatcatcgtggccaacatggacactgtgggcacgtttgagatggcagccgtgatgtcacagcactccatgtttacagcaattcataagcattactccctggatgactggaagctctttgccacaaatcacccagaatgcctgcagaatgtagccgtgagttcaggcagtgggcagaatgatctggaaaagatgaccagcatcctggaagctgtgccacaggttaagtttatttgcctggatgtggccaatgggtattcagaacattttgtggaattcgtgaaacttgtccgtgccaaatttcctgaacacaccattatggcagggaacgtggtgacaggagaaatggtagaagagcttattctttccggagcagatatcatcaaagtgggagttggaccaggttctgtgtgcaccacccgcaccaagacgggagtggggtacccccagctgagtgccgtcattgagtgtgccgactctgcccatggcctgaagggccacatcatctctgatggaggctgtacgtgtccaggggatgtcgccaaagcctttggagctggagcagattttgtcatgctgggaggaatgttttcgggtcatacggagtgtgctggagaagtgattgagaggaacggacggaagctcaagctcttctacgggatgagctctgacaccgccatgaacaagcacgcaggaggagttgctgagtacagagcctctgagggtaagactgtggaagttccttacaaaggagatgtggaaaacactatcctggatattctcgggggactgaggtccacgtgcacctacgtgggggccgccaaactcaaggagctcagcaggagggcaacattcatccgggtgacccagcagcacaacaccgtgttcagctaaccctggggacaaagcagcgtctggctcgagtggaagcgtccaaacctgcttttcccatctccccccaagtctgttccgtcagagcttctggctgctcctgaatggtggaatgctgtgtcctctcttctgtctcctgccgcctggaggcttcggggctctcccgcctgccttgtcggggcccagacgcaaggcaccgattgggccaacatcagagccctgctgcccagaactcataacctcattgttcaaaccaacacttgcacctttctctttttctctttctctctccctttctttgtttttctttcttttttaaaagaagatggtttcactttaatataatgctattatcttaagacttaaaaaaaaaaaaaaaaaa

SEQ ID NO: 123 - DNA, 3088 bp, Homo sapiens
attgcaattactcattttgataaagtttattcttaggcgttaaccatttctaaaggatccccaaatcatcacttacttaggtgaaattatataaaatgacacatttctgagaaatgtttaggtccagtgaaccgtagttggtttatgggagtgatttcgagatagccaaatgaactttgatttttgttttgaatgtggtggagtcaagagattgtagatgcctagtttgatttaaacactattgtaaacctatcttgcctattgtgtggacaccaaaagagaccaatgagcctgtttatttttcagaggtctaggaaaattgcatccgtgtgagtagatgtacagaactaatctaaaagtgactgctagtaatattttagaatataataatttcaagaattattctgagtgttttaaatgtgccctgaaatgttggcatgtcatttcagcatttccatttgaattgctcttgtaatatttttgcacaaaaaggactgagaaaaagactactttggttaaaggaaaaaaatagtataatttggtctttaattttaatgtctcctgtggaaacactggggatgaattttgttggcacagttattcaggatatttaaaacagtgttgaacagttcacaagaaattaagcaaacttggattttaaaaattaaaatactttctttccatgtgactgttttgcatagttttttccccctatgtcataacactacattccttgtttttcttaaataaaatactctgcaggttttgttgtgagtgtttataacagtattttgtaagctgcctgggtttcctcagggaaacattatttagtggaataggatatagtttatggagagacaactaagtgaaatcccatcaccaccaccagcaagcactgaggtgctgcattaagtgacaatcaaactagtaagtatttatgaaagaatttagaaaggggttcaaagaagcaattgcttttaaagcagttctctggggttcttgaataaaaatggctaaatgtatttatttatattttaaaatacctgtgtgttctgttttctcatcaaagtgatttcggtgtcatgtatttaatgtgtggtttgttttgttttgcaccatattcttcttagggaactggctctgatttggggtgcagtcaccaactctcatgataatctttacggacagtctgaatctactttacttcaggacggcagtggaggggccaactccagatgcccctgcacttccctcctcaagtcatctaagaaagaattttagaaataactcctttcaaatctgattcatacagttccaacctttttctagtttcacttgctgccttctttgttttatgggcactttttgtgtgattacttccccaacacagtcaaaggccagtatgacagaaccaatggcacatgatgcctctattttgcccatttggggaaatgttagtaaaagaaatagcatcttttaatggctgtcattatcatatccatattaaaatccatttaaagttcttaaatttggcggaataatgtatacaggctgtaaacttctacaaaaaatgtttgctgtctttaatatggtgtcaagttacttggtcctttgaaaacaaaacaaaacttccatacacagcactgcccagtaaagcagtgttggaatattggaaacctagacattcgaggatccttcttgctcacaagcattggaacagaatcctccactttaggactcagagaagctatggagtcccacaggctaggtatagcacacaacttagagaacggtagttaaagcacgtcaaccacaattgaatttaatgatctaaaaaatatttcttaactctgagggttaaactgaagatacgttttcaaataaaagcttttaaatttcttaggaaacaaactgtgacatcgcttttaaaaatgacattcaaatgtttataatgtgtgtttttgagttggcttggactagtgcaagttcactgctggcaatggttatgccagtagttaagttaaaataagttgttaccttcagattgatgtcttgtataaccacaatcatcttcaagcaaaaaaattggccaggaaatgtctttttaaaaaaaaaaaaaaaaaaagatgtgtcagccagaacagttaccattcagaccatactggaatgattttgaaatctttactatggtttaagttggggaaggcctcagtatggcattttcatattcactctatgtaaagattgaagcccaaagatgagttaaattcagtgctgtattgaaaccagtcagtgcaaaaaaaaaaaaaagttttacctttgtaaatttttcattgttaacatcagttggtagttgttaaaacatgcaccaaattctttataatgttctgtgtggttctcaatgtgatattcttgacattgctgtccttactgcttggttcttggttttaaattaaaaagtagatgtagctcatcatttttacttccaaaacggtggagctaaaaacggctaattgatcttgagataagaataccctttactaaggcaaagatttaattgaaatccaaaatgatttatagaaacgaaaggcattttccatttgttgtcttctgccgaaattctgaattgcatacacgcatgaaggataatgaatggtttcaacggtgctatattaggttctctgattttcatgacctatgtatgtttggaaatacaatattgtataaaatgtggatcgttttgttaccgatttaatattgccattttaatttggtgtaacaattggttacacttgtttttcaaagctatcctttgaggagaaagtcaaaatgtgttgttagcctacctccactcaggcctcttgctgtgtaatcattattccaggttatgatgtgcatagcttttaaaactgcgtgtactattattctgctctttcccatactcttgtcatgtattcagaacctaaacttatagcaaaagagccaagcagtagcagtttttgtaaatgtaaaaataattagatccagactttgtttccttcaattttaaaaataaaaaatacctcagtgctaaaaaaaaaaaaaaaaa

SEQ ID NO: 124 - DNA, 550 bp, Homo sapiens
ggatattactttccttgaaatctaaaagtctgagaatcatgtaatgaacaggtaaaagaaaatgtaagaacattatttaagaagaccatgtttttgtagaggaaaaaagaacatccaccctttacagttatttatttgtccccaacttttggaattaaaagacctgaacttgacatttatgtatttatatttggctaaacatcttgaaacctttgcaaaaaaaacaaaagccagaaaaaataaaacaaatattaacaataacaatttttgggtgtgaaaattcatgggaaatgtattttttttctgtccactttagtatattctcaggattttctatgaaatgtatacacaacttattcaaaatgaattttaaaatgtaaaataacttttaatatcactacgttttaagtattattttaaacataataattctgaaacaaaatagagaattcctgacaaccaatctcacctctgaactgctcttttttaaggcattggtaagacaatctttgtttttgtcccaaccacttctatctatcctcctatacta

SEQ ID NO: 125 - DNA, 996 bp, Homo sapiens
agcgtgtgggaagaaaactgggttgatccctatcttctttttaaggagccacatttgccatttattattgctcttttgcctatttaaaaaaaataacagtcagaaaaaataatgattattaaaatgatagtcattatttacttagtgaatgtcaggataggtatttattactcttagcttcttattggtatcagatgtagatcacggtcttactgttgattaactcttcagttatatatacatactttgattctttagttacataattgataacaaagtgtgcttctgaagaattattctggctgtatggctcttgtttcctccccttggtaaaaatggaggcatgaatctcagttttgtgatctgcttttaatttcatatatgacattatttgatatacataattaccaacatccaaaagcgtttcttcccctttctacgtgtgcactaaattctaaaacaaaaattggaatacaaaatgcctaataaagaaaaaattcatgtacagaaaagcaaaagataatctactttgttaagataatttgtcactagctggttgaataatgcacagtttttgtttaaggttacacatttatgcctggattaaataacaatagtaaaacttgacaagtcttttgaaaaacagctgctaaacatattgctttctggaatgtaatcattagcaacaaatattctcttattctatacaattgcagaatgctagtggaactttcttgtaggttatttgacaatgaatgttaattgatttattttttaaaaatgtaaaatcctcttatccctttaaggccggtttaggctttcatgtccctgtggtagaaaatttcaaatgctggcttctaatttctactcactgaagtgtcttccagacataccagatggttggagctcctttgatagtatataagggagctacataaatgtatttgaactaactcgtgagcaaaatttctgttttcagaaaaaaaaaaaaaaaaa

SEQ ID NO: 126 - DNA, 3334 bp, Homo sapiens
attcctgcctgggaggttgtggaagaaggaagatggccagagctttgtgtccactgcaagccctctggcttctggagtgggtgctgctgctcttgggaccttgtgctgcccctccagcctgggccttgaacctggacccagtgcagctcaccttctatgcaggccccaatggcagccagtttggattttcactggacttccacaaggacagccatgggagagtggccatcgtggtgggcgccccgcggaccctgggccccagccaggaggagacgggcggcgtgttcctgtgcccctggagggccgagggcggccagtgcccctcgctgctctttgacctccgtgatgagacccgaaatgtaggctcccaaactttacaaaccttcaaggcccgccaaggactgggggcgtcggtcgtcagctggagcgacgtcattgtggcctgcgccccctggcagcactggaacgtcctagaaaagactgaggaggctgagaagacgcccgtaggtagctgctttttggctcagccagagagcggccgccgcgccgagtactccccctgtcgcgggaacaccctgagccgcatttacgtggaaaatgattttagctgggacaagcgttactgtgaagcgggcttcagctccgtggtcactcaggccggagagctggtgcttggggctcctggcggctattatttcttaggtctcctggcccaggctccagttgcggatattttctcgagttaccgcccaggcatccttttgtggcacgtgtcctcccagagcctctcctttgactccagcaacccagagtacttcgacggctactgggggtactcggtggccgtgggcgagttcgacggggatctcaacactacagaatatgtcgtcggtgcccccacttggagctggaccctgggagcggtggaaattttggattcctactaccagaggctgcatcggctgcgcgcagagcagatggcgtcgtattttgggcattcagtggctgtcactgacgtcaacggggatgggaggcatgatctgctggtgggcgctccactgtatatggagagccgggcagaccgaaaactggccgaagtggggcgtgtgtatttgttcctgcagccgcgaggcccccacgcgctgggtgcccccagcctcctgctgactggcacacagctctatgggcgattcggctctgccatcgcacccctgggcgacctcgaccgggatggctacaatgacattgcagtggctgccccctacgggggtcccagtggccggggccaagtgctggtgttcctgggtcagagtgaggggctgaggtcacgtccctcccaggtcctggacagccccttccccacaggctctgcctttggcttctcccttcgaggtgccgtagacatcgatgacaacggatacccagacctgatcgtgggagcttacggggccaaccaggtggctgtgtacagagctcagccagtggtgaaggcctctgtccagctactggtgcaagattcactgaatcctgctgtgaagagctgtgtcctacctcagaccaagacacccgtgagctgcttcaacatccagatgtgtgttggagccactgggcacaacattcctcagaagctatccctaaatgccgagctgcagctggaccggcagaagccccgccagggccggcgggtgctgctgctgggctctcaacaggcaggcaccaccctgaacctggatctgggcggaaagcacagccccatctgccacaccaccatggccttccttcgagatgaggcagacttccgggacaagctgagccccattgtgctcagcctcaatgtgtccctaccgcccacggaggctggaatggcccctgctgtcgtgctgcatggagacacccatgtgcaggagcagacacgaatcgtcctggactctggggaagatgacgtatgtgtgccccagcttcagctcactgccagcgtgacgggctccccgctcctagttggggcagataatgtcctggagctgcagatggacgcagccaacgagggcgagggggcctatgaagcagagctggccgtgcacctgccccagggcgcccactacatgcgggccctaagcaatgtcgagggctttgagagactcatctgtaatcagaagaaggagaatgagaccagggtggtgctgtgtgagctgggcaaccccatgaagaagaacgcccagataggaatcgcgatgttggtgagcgtggggaatctggaagaggctggggagtctgtgtccttccagctgcagatacggagcaagaacagccagaatccaaacagcaagattgtgctgctggacgtgccggtccgggcagaggcccaagtggagctgcgagggaactcctttccagcctccctggtggtggcagcagaagaaggtgagagggagcagaacagcttggacagctggggacccaaagtggagcacacctatgagctccacaacaatggccctgggactgtgaatggtcttcacctcagcatccaccttccgggacagtcccagccctccgacctgctctacatcctggatatacagccccaggggggccttcagtgcttcccacagcctcctgtcaaccctctcaaggtggactgggggctgcccatccccagcccctcccccattcacccggcccatcacaagcgggatcgcagacagatcttcctgccagagcccgagcagccctcgaggcttcaggatccagttctcgtaagctgcgactcggcgccctgtactgtggtgcagtgtgacctgcaggagatggcgcgcgggcagcgggccatggtcacggtgctggccttcctgtggctgcccagcctctaccagaggcctctggatcagtttgtgctgcagtcgcacgcatggttcaacgtgtcctccctcccctatgcggtgcccccgctcagcctgccccgaggggaagctcaggtgtggacacagctgctccgggccttggaggagagggccattccaatctggtgggtgctggtgggtgtgctgggtggcctgctgctgctcaccatcctggtcctggccatgtggaaggtcggcttcttcaagcggaaccggccacccctggaagaagatgatgaagagggggagtgatggtgcagcctacactattctagcaggagggttgggcgtgctacctgcaccgccccttctccaacaagttgcctccaagctttgggttggagctgttccattgggtcctcttggtgtcgtttccctcccaacagagctgggctaccccccctcctgctgcctaataaagagactgagccctg

SEQ ID NO: 127 - DNA, 1666 bp, Homo sapiens
ctccataaggcacaaactttcagagacagcagagcacacaagcttctaggacaagagccaggaagaaaccaccggaaggaaccatctcactgtgtgtaaacatgacttccaagctggccgtggctctcttggcagccttcctgatttctgcagctctgtgtgaaggtgcagttttgccaaggagtgctaaagaacttagatgtcagtgcataaagacatactccaaacctttccaccccaaatttatcaaagaactgagagtgattgagagtggaccacactgcgccaacacagaaattattgtaaagctttctgatggaagagagctctgtctggaccccaaggaaaactgggtgcagagggttgtggagaagtttttgaagagggctgagaattcataaaaaaattcattctctgtggtatccaagaatcagtgaagatgccagtgaaacttcaagcaaatctacttcaacacttcatgtattgtgtgggtctgttgtagggttgccagatgcaatacaagattcctggttaaatttgaatttcagtaaacaatgaatagtttttcattgtaccatgaaatatccagaacatacttatatgtaaagtattatttatttgaatctacaaaaaacaacaaataatttttaaatataaggattttcctagatattgcacgggagaatatacaaatagcaaaattgaggccaagggccaagagaatatccgaactttaatttcaggaattgaatgggtttgctagaatgtgatatttgaagcatcacataaaaatgatgggacaataaattttgccataaagtcaaatttagctggaaatcctggatttttttctgttaaatctggcaaccctagtctgctagccaggatccacaagtccttgttccactgtgccttggtttctcctttatttctaagtggaaaaagtattagccaccatcttacctcacagtgatgttgtgaggacatgtggaagcactttaagttttttcatcataacataaattattttcaagtgtaacttattaacctatttattatttatgtatttatttaagcatcaaatatttgtgcaagaatttggaaaaatagaagatgaatcattgattgaatagttataaagatgttatagtaaatttattttattttagatattaaatgatgttttattagataaatttcaatcagggtttttagattaaacaaacaaacaattgggtacccagttaaattttcatttcagataaacaacaaataattttttagtataagtacattattgtttatctgaaattttaattgaactaacaatcctagtttgatactcccagtcttgtcattgccagctgtgttggtagtgctgtgttgaattacggaataatgagttagaactattaaaacagccaaaactccacagtcaatattagtaatttcttgctggttgaaacttgtttattatgtacaaatagattcttataatattatttaaatgactgcatttttaaatacaaggctttatatttttaactttaagatgtttttatgtgctctccaaattttttttactgtttctgattgtatggaaatataaaagtaaatatgaaacatttaaaatataatttgttgtcaaagtaaaaaaaaaaaaaaa

SEQ ID NO: 128 - DNA, 3389 bp, Homo sapiens
gtcggtgtgacaactgatcgggtgaacgatgcaccactaaccaccatggaaacaaggaaaaataaagcaagctcacaggatctctcttcactggattgagagcctcagcctgccgactgagaaaaagagttccaggaaaaagaaggaatcccggctgcagcctcctgccttcctttatattttaaaatagagagataagattgcgtgcatgtgtgcatatctatagtatatattttgtacactttgttacacagacacacaaatgcacctatttataccgggcaagaacacaaccatgtgattatctcaaccaaggaactgaggaatccagcacgcaaggacatcggaggtgggctagcactgaaactgcttttcaagcatcatgctgctattcctgcaaatactgaagaagcatgggatttaaatattttacttctaaataaatgaattactcaatctcctatgaccatctatacatactccaccttcaaaaagtacatcaatattatatcattaaggaaatagtaaccttctcttctccaatatgcatgacatttttggacaatgcaattgtggcactggcacttgtttcagtgaagaaaaactttgtggttctatggcattcatcatttgacaaatgcaagcatcttccttatcaatcagctcctattgaacttactagcactgactgtggaatccttaagggcccattacatttctgaagaagaaagctaagatgaaggacatgccactccgaattcatgtgctacttggcctagctatcactacactagtacaagctgtagataaaaaagtggattgtccacggttatgtacgtgtgaaatcaggccttggtttacacccagatccatttatatggaagcatctacagtggattgtaatgatttaggtcttttaactttcccagccagattgccagctaacacacagattcttctcctacagactaacaatattgcaaaaattgaatactccacagactttccagtaaaccttactagcctggatttatctcaaaacaatttatcttcagtcaccaatattaatgtaaaaaagatgcctcagctcctttctgtgtacctagaggaaaacaaacttactgaactgcctgaaaaatgtctgtccgaactgagcaacttacaagaactctatattaatcacaacttgctttctacaatttcacctggagcctttattggcctacataatcttcttcgacttcatctcaattcaaatagattgcagatgatcaacagtaagtggtttgatgctcttccaaatctagagattctgatgattggggaaaatccaattatcagaatcaaagacatgaactttaagcctcttatcaatcttcgcagcctggttatagctggtataaacctcacagaaataccagataacgccttggttggactggaaaacttagaaagcatctctttttacgataacaggcttattaaagtaccccatgttgctcttcaaaaagttgtaaatctcaaatttttggatctaaataaaaatcctattaatagaatacgaaggggtgattttagcaatatgctacacttaaaagagttggggataaataatatgcctgagctgatttccatcgatagtcttgctgtggataacctgccagatttaagaaaaatagaagctactaacaaccctagattgtcttacattcaccccaatgcatttttcagactccccaagctggaatcactcatgctgaacagcaatgctctcagtgccctgtaccatggtaccattgagtctctgccaaacctcaaggaaatcagcatacacagtaaccccatcaggtgtgactgtgtcatccgttggatgaacatgaacaaaaccaacattcgattcatggagccagattcactgttttgcgtggacccacctgaattccaaggtcagaatgttcggcaagtgcatttcagggacatgatggaaatttgtctccctcttatagctcctgagagctttccttctaatctaaatgtagaagctgggagctatgtttcctttcactgtagagctactgcagaaccacagcctgaaatctactggataacaccttctggtcaaaaactcttgcctaataccctgacagacaagttctatgtccattctgagggaacactagatataaatggcgtaactcccaaagaagggggtttatatacttgtatagcaactaacctagttggcgctgacttgaagtctgttatgatcaaagtggatggatcttttccacaagataacaatggctctttgaatattaaaataagagatattcatgccaattcagttttggtgtcctggaaagcaagttctaaaattctcaaatctagtgttaaatggacagcctttgtcaagactgaaaattctcatgctgcgcaaagtgctcgaataccatctgatgtcaaggtatataatcttactcatctgaatccatcaactgagtataaaatttgtattgatattcccaccatctatcagaaaaacagaaaaaaatgtgtaaatgtcaccaccaaaggtttgcaccctgatcaaaaagagtatgaaaagaataataccacaacacttatggcctgtcttggaggccttctggggattattggtgtgatatgtcttatcagctgcctctctccagaaatgaactgtgatggtggacacagctatgtgaggaattacttacagaaaccaacctttgcattaggtgagctttatcctcctctgataaatctctgggaagcaggaaaagaaaaaagtacatcactgaaagtaaaagcaactgttataggtttaccaacaaatatgtcctaaaaaccaccaaggaaacctactccaaaaatgaacaaaaaaaaaaaaagcgaaagactgcagttgtgctaaaaacaaaacaaaacaaacaaacaaacaaaaaagtaaaaaaagattactttcgagagagaagtttaagcttcaccaatgctgctcctgaccaatggaaatatgtacaacttcagcattttaagtaactggcttcaaggggtactgtggcaaccaaataaaataactccattttctaaaactttcatgtaacttttatgtctggactacagttcaagtggacaaaaacatttctgtattttttttaagtaaataagagtagttgaactgagcaatacctcctcctgtgttgtattacacatattagccacgagtttttgcagtgaccagataaacttgaattgacacgtggtgtaataaaatggacaaattctgtagagtagacacagtgagtatgtggacctcttttataaggaaaaatacattttggattaaaatcaaaaaaaaaaaaaaaaaaaaa

SEQ ID NO: 129 - DNA, 984 bp, Homo sapiens
cccacgcgtccgcccacgcgtccgcaggcactgaagtacttgatactaattggatattatgaccacttttcagcaattgtattactgtaatggtgggatccataaaggaaatggtaaacctgtcttatatgggtagttgtgtgaattgcaaaacttacatcaaataatttttttgcctcgtcttttgaacaagtcatgacatcattctagttcctttttcaacttagtgagatgtctgctctgtgttaatattataatgtgtataatctacaacagaattgtcctccaaattgcaagttttcctttttgaatctaatatatcaggctcatttttagatgacttagatgcataaggattttatcgtagcttgatgttagctctctgtaacctttcaggtatattaatcaaaaaagccaaacttaataaagcatctaatttaaaatggattgatctcaaatattttatagccactatcttttcacaatagtaaaacataaaagagtttaagctatgccaatttagagagtgcttaacaatgtgtaattactttattttcacttaatagatttttacctgtgccttgtttcagatctgaataggtttcctttgacctcaaaatcactaatgcagggaaaattaccatatcatgagagtatttttcctctttcttttttttgcctgatgcttagaataataaatactcccaaggcttaggagtagacatggcctgagagaaagcctattaaatgctattttctaatggttttaaaaaacaacttaaacaaatcatgctactcaaactgattttcttgctaaaacagaactagttttagagtatattttagacatctttttttctcaattactagttaaacttgaagttgggctctatctggatttgctttatagatctgcttcatttcatgccagatttgggcaaaccatgaacaacccccaactccaggaaaaaaaaaaaaaaaaaa

SEQ ID NO: 130 - DNA, 1542 bp, Homo sapiens
acaattactctacagctcagaacaccaactgctgaggctgccttgggaagaggatgatcctaaacaaagctctgctgctgggggccctcgctctgaccaccgtgatgagcccctgtggaggtgaagacattgtggctgaccacgttgcctcttgtggtgtaaacttgtaccagttttacggtccctctggccagtacacccatgaatttgatggagatgagcagttctacgtggacctggagaggaaggagactgcctggcggtggcctgagttcagcaaatttggaggttttgacccgcagggtgcactgagaaacatggctgtggcaaaacacaacttgaacatcatgattaaacgctacaactctaccgctgctaccaatgaggttcctgaggtcacagtgttttccaagtctcccgtgacactgggtcagcccaacaccctcatttgtcttgtggacaacatctttcctcctgtggtcaacatcacatggctgagcaatgggcagtcagtcacagaaggtgtttctgagaccagcttcctctccaagagtgatcattccttcttcaagatcagttacctcaccttcctcccttctgctgatgagatttatgactgcaaggtggagcactggggcctggaccagcctcttctgaaacactgggagcctgagattccagcccctatgtcagagctcacagagactgtggtctgtgccctggggttgtctgtgggcctcatgggcattgtggtgggcactgtcttcatcatccaaggcctgcgttcagttggtgcttccagacaccaagggccattgtgaatcccatcctggaagggaaggtgcatcgccatctacaggagcagaagaatggacttgctaaatgacctagcactattctctggcccgatttatcatatcccttttctcctccaaatatttctcctctcaccttttctctgggacttaagctgctatatcccctcagagctcacaaatgcctttacattctttccctgacctcctgattttttttttcttttctcaaatgttacctacaaagacatgcctggggtaagccacccggctacctaattcctcagtaacctccatctaaaatctccaaggaagcaataaattccttttatgagatctatgtcaaatttttccatctttcatccagggctgactgaaactatggctaataattggggtactcttatgtttcaatccaatttaacctcatttcccagatcatttttcatgtccagtaacacagaagccaccaagtacagtatagcctgataatatgttgatttcttagctgacattaatatttcttgcttccttgtgttcccacccttggcactgccacccacccctcaattcaggcaacaatgaaattaatggataccgtctgcccttggcccagaattgttatagcaaaaattttagaaccaaaaaataagtctgtactaatttcaatgtggcttttaaaagtatgacagagaaataagttaggataaaggaaatttgaatctca

SEQ ID NO: 131 - DNA, 1897 bp, Homo sapiens
gcgggaagtctgaagccggtaaacatggccgtcaccgacagcctcagccgggctgcgactgtcttggcaactgtgttgctcttgtccttcggcagcgtggccgctagtcatatcgaggatcaagcagaacaattctttagaagtggccatacaaacaactgggctgttctggtgtgtacatcccgattctggtttaattatcgacatgttgcaaataccctttctgtttatagaagtgtcaagaggctaggtattcctgacagtcacattgtcctaatgcttgcagatgatatggcctgtaatcctagaaatcccaaaccagctacagtgtttagtcacaagaatatggaactaaatgtgtatggagatgatgtggaagtggattatagaagttatgaggtaactgtggagaattttttacgggtattaactgggaggatcccacctagtactcctcggtcaaaacgtcttctttctgatgacagaagcaatattctaatttatatgacagggcatggtggaaatggtttcttaaaatttcaagattctgaagaaattaccaacatagaactcgcggatgcttttgaacaaatgtggcagaaaagacgctacaatgagctactgtttattattgatacttgccaaggagcatccatgtatgaacgattttattctcctaacataatggctctagctagtagtcaagtgggagaagattcactctcgcatcaacctgatcctgcaattggagtccatcttatggatagatacacattttatgtcttggaatttttggaagaaattaacccagctagccaaactaatatgaatgacctttttcaggtatgtcccaaaagtctgtgtgtgtctactcctggacatcgcactgatctttttcagagggatcctaaaaatgtactgataactgatttctttggaagtgtacggaaagtggaaattacaacagagactattaaattgcaacaggattcagaaatcatggaaagcagctataaggaagaccagatggatgagaaactaatggaacctctgaaatatgctgaacaacttcctgtagctcagataatacaccagaaaccgaagctgaaagactggcatcctcctgggggctttattctgggattatgggcacttattatcatggttttcttcaaaacttatggaattaagcatatgaagttcattttttagacttgatgatgaatgaagaatgcatggaggactgcaaacttggataataatttatgtcattatatatttttaaaaatgtgtttctcttgtatgaattggaaataagtataaggaaactaaatttgaatcaactattaattttataacttaaagaaaaataattgttaatgcaactgcttaatggcactaaatatattccagttttgtattttgtgtattataaaagcgaatgagacagagatcagaatacattgactgtttttgaaaatagtaatttccccttatccccttttcatttggaaaagaaacaattgtgaagacattaaattctcactaacagaagtaactttggttaattattttttgtatatcctcccaatcttttgacttatgcacatattttttcccaatatggagatcatatggaatgtactattttgtaatgtcttttttcattttacaatgtattatcaaccttttccctctcaaaaatacattgtgaatgactgcatagtattcactttatgaatatttaattcatttcacagtcttctattgttggaccacttacattgtaccaaatgttttcctttggtttattctttaatgtattaatattttactgctggtcactcatggaatcctgcagctttaattaaaagcaaagatgaaaaaaaaaaaaaaa

SEQ ID NO: 132 - DNA, 1721 bp, Homo sapiens
caccagcacagcaaacccgccgggatcaaagtgtaccagtcggcagcatggctacgaaatgtgggaattgtggacccggctactccacccctctggaggccatgaaaggacccagggaagagatcgtctacctgccctgcatttaccgaaacacaggcactgaggccccagattatctggccactgtggatgttgaccccaagtctccccagtattgccaggtcatccaccggctgcccatgcccaacctgaaggacgagctgcatcactcaggatggaacacctgcagcagctgcttcggtgatagcaccaagtcgcgcaccaagctggtgctgcccagtctcatctcctctcgcatctatgtggtggacgtgggctctgagccccgggccccaaagctgcacaaggtcattgagcccaaggacatccatgccaagtgcgaactggcctttctccacaccagccactgcctggccagcggggaagtgatgatcagctccctgggagacgtcaagggcaatggcaaagggggttttgtgctgctggatggggagacgttcgaggtgaaggggacatgggagagacctgggggtgctgcaccgttgggctatgacttctggtaccagcctcgacacaatgtcatgatcagcactgagtgggcagctcccaatgtcttacgagatggcttcaaccccgctgatgtggaggctggactgtacgggagccacttatatgtatgggactggcagcgccatgagattgtgcagaccctgtctctaaaagatgggcttattcccttggagatccgcttcctgcacaacccagacgctgcccaaggctttgtgggctgcgcactcagctccaccatccagcgcttctacaagaacgagggaggtacatggtcagtggagaaggtgatccaggtgccccccaagaaagtgaagggctggctgctgcccgaaatgccaggcctgatcaccgacatcctgctctccctggacgaccgcttcctctacttcagcaactggctgcatggggacctgaggcagtatgacatctctgacccacagagaccccgcctcacaggacagctcttcctcggaggcagcattgttaagggaggccctgtgcaagtgctggaggacgaggaactaaagtcccagccagagcccctagtggtcaagggaaaacgggtggctggaggccctcagatgatccagctcagcctggatgggaagcgcctctacatcaccacgtcgctgtacagtgcctgggacaagcagttttaccctgatctcatcagggaaggctctgtgatgctgcaggttgatgtagacacagtaaaaggagggctgaagttgaaccccaacttcctggtggacttcgggaaggagccccttggcccagcccttgcccatgagctccgctaccctgggggcgattgtagctctgacatctggatttgaactccaccctcatcacccacactccctattttgggccctcacttccttggggacctggcttcattctgctctctcttggcacccgacccttggcagcatgtaccacacagccaagctgagactgtggcaatgtgttgagtcatatacatttactgaccactgttgcttgttgctcactgtgctgcttttccatgagctcttggaggcaccaagaaataaactcgtaaccctgtccttcaaaaaaaaaaaaaaaaa

SEQ ID NO: 133 - DNA, 3592 bp, Homo sapiens
gaggaagaggctgaggaggcgcggggggcgggggaggctcaggagcgggcggtgacggcgacggcggcggcagaggaggcagcggctgggccgggccccgtgcgtctgtccgcgccccgtggatgcgaatcggccgcggcggaggcggcggcggcggaggaggcggcggcgggaggaggagtcggtgagccggctccgggccggaggggcgcggaggatgaggccgctgcctggcgctcttggcgtggcggcggccgccgcgctgtggctgctgctgctgctgctgccccggacccgggcggacgagcacgaacacacgtatcaagataaagaggaagttgtcttatggatgaatactgttgggccctaccataatcgtcaagaaacatataagtacttttcacttccattctgtgtggggtcaaaaaaaagtatcagtcattaccatgaaactctgggagaagcacttcaaggggttgaattggaatttagtggtctggatattaaatttaaagatgatgtgatgccagccacttactgtgaaattgatttagataaagaaaagagagatgcatttgtatatgccataaaaaatcattactggtaccagatgtacatagatgatttaccaatatggggtattgttggtgaggctgatgaaaatggagaagattactatctttggacctataaaaaacttgaaataggttttaatggaaatcgaattgttgatgttaatctaactagtgaaggaaaggtgaaactggttccaaatactaaaatccagatttcatattcagtaaaatggaaaaagtcagatgtgaaatttgaagatcgatttgacaaatatcttgatccgtccttttttcaacatcggattcattggttttcaattttcaactccttcatgatggtgatcttcttggtgggcttagtttcaatgattttaatgagaacattaagaaaagattatgctcggtacagtaaagaggaagaaatggatgatatggatagagacctaggagatgaatatggatggaaacaggtgcatggagatgtatttagaccatcaagtcacccactgatattttcctctctgattggttctggatgtcagatatttgctgtgtctctcatcgttattattgttgcaatgatagaagatttatatactgagaggggatcaatgctcagtacagccatatttgtctatgctgctacgtctccagtgaatggttattttggaggaagtctgtatgctagacaaggaggaaggagatggataaagcagatgtttattggggcattccttatcccagctatggtgtgtggcactgccttcttcatcaatttcatagccatttattaccatgcttcaagagccattccttttggaacaatggtggccgtttgttgcatctgtttttttgttattcttcctctaaatcttgttggtacaatacttggccgaaatctgtcaggtcagcccaactttccttgtcgtgtcaatgctgtgcctcgtcctataccggagaaaaaatggttcatggagcctgcggttattgtttgcctgggtggaattttaccttttggttcaatctttattgaaatgtatttcatcttcacgtctttctgggcatataagatctattatgtctatggcttcatgatgctggtgctggttatcctgtgcattgtgactgtctgtgtgactattgtgtgcacatattttctactaaatgcagaagattaccggtggcaatggacaagttttctctctgctgcatcaactgcaatctatgtttacatgtattccttttactactattttttcaaaacaaagatgtatggcttatttcaaacatcattttactttggatatatggcggtatttagcacagccttggggataatgtgtggagcgattggttacatgggaacaagtgcctttgtccgaaaaatctatactaatgtgaaaattgactagagacccaagaaaacctggaactttggatcaatttctttttcataggggtggaacttgcacagcaaaaacaaacaaacgcaagaagagatttgggctttaacacactgggtactttgtgggtctctctttcgtcggtggcttaaagtaacatctatttccattgatcctaggttcttcctgactgctttctccaactgttcacagcaaatgcttggattttatgcagtaggcattactacagtacatggctaatcttcccaaaaactagctcattaaagatgaaatagaccagctctcttcagtgaagaggacaaatagtttatttaaagcatttgttccaataaaataaatagagggaaacttggatgctaaaattacatgaataggaatcttcctggcacttagtgtttctatgttattgaaaaatgatgttccagaaagattacttttttcctcttatttttactgccattgtcgacctattgtgggacatttttatatattgaatctgggttcttttttgacttttttttttcccaatccaacagcatccttttttttaaaagagagaattagaaaatattaaatcctgcatgtaatatatctgctgtcatcttagttggaccaacttcccatttatttatcttaaaactatacagttacatcttaattccatccaaagaagatacagtttgaagacagaagtgtactctctacaatgcaatttactgtacagttagaaagcaaagtgttaaatggagaagatacttgtttttattaaacattttgagatttagataaactacattttaactgaatgtctaaagtgattatcttttttccccccaagttagtcttaaatcttttgggtttgaatgaaggttttacataagaaattattaaaaacaaggggggtgggtaataaatgtatataacattaaataatgtaacgtaggtgtagattcccaaatgcatttggatgtacagatcgactacagagtacttttttcttatgatgattggtgtagaaatgtgtgatttgggtgggcttttacatcttgcctaccattgcatgaaacattggggtttcttcaaaatgtgtgtgtcatacttcttttgggaggggggttgttttcttctgtttattttctgagactcctacaggagccaaatttgtaatttagagacacttaattttgttaatcctgtctgggacacttaagtaacatctaaagcattattgctttagaatgttcaaataaaatttcctgaccaaattgttttgtggaaatagatgtgtttgcaatttgaagatatctttctgtccagaaggcaaaattaccgaatgccatttttaaaagtatgctataaactatgctactctcatacaggggacccgtattttaaaatctccagacttgcttacatctagattatccagcacaatcataaagtgaatgacaaaccctttgaatgaaattgtggcacaaaatctgttcaggttggtgtaccgtgtaaagtggggatggggtaaaagtggttaacgtactgttggatcaacaaataaaggttacagttttgtaagagaaaaaaaaaaaaaaaaaa

SEQ ID NO: 134 - DNA, 3917 bp, Homo sapiens
tagtcggagcgaggtggcgagtcgctgagcccgccgcggccccgagagcggctgcagccgccgccgccgggaaggagagggcgaggcgcgcccgagccgccgccgccgccgccaccgccgccgccgccaccaccgccaccggagtcgcgggccagccgggcagcctccgcgggccccggccggggcggggggcgcgggccacaggcccctgctccggccgtcgtttgcagaccgcgggcgccgatgtcgcccgcgccccgttaggatgagtctcgggtcgggcgaggagccgccgcagccgccgccgcccgagccgcgggcaggagcctcgggagccgccgccgccgccgccgccgcccggccgggccccgacgccgcccgcgcgcccccgggcccccgacacacatgagattcttcaggctcactttcaagtgcttcgtggactgcttctgactgcgccgcccgcgccccgcaccccgccgtccgcccgccgccccgtcccccggcccggccgccccccggcccccggccggcccgcgccctcggggccctccccggtgccgccggtgccccccgcctgaccgccgccccccgtgaggcgccgcgaccccggcccggccgtgcggcccgccggggccatggcgaagaagagcgccgagaacggcatctatagcgtgtccggcgacgagaagaagggccccctcatcgcgcccgggcccgacggggccccggccaagggcgacggccccgtgggcctggggacacccggcggccgcctggccgtgccgccgcgcgagacctggacgcgccagatggacttcatcatgtcgtgcgtgggcttcgccgtgggcttgggcaacgtgtggcgcttcccctacctgtgctacaagaacggcggaggtgtgttccttattccctacgtcctgatcgccctggttggaggaatccccattttcttcttagagatctcgctgggccagttcatgaaggccggcagcatcaatgtctggaacatctgtcccctgttcaaaggcctgggctacgcctccatggtgatcgtcttctactgcaacacctactacatcatggtgctggcctggggcttctattacctggtcaagtcctttaccaccacgctgccctgggccacatgtggccacacctggaacactcccgactgcgtggagatcttccgccatgaagactgtgccaatgccagcctggccaacctcacctgtgaccagcttgctgaccgccggtcccctgtcatcgagttctgggagaacaaagtcttgaggctgtctgggggactggaggtgccaggggccctcaactgggaggtgaccctttgtctgctggcctgctgggtgctggtctacttctgtgtctggaagggggtcaaatccacgggaaagatcgtgtacttcactgctacattcccctacgtggtcctggtcgtgctgctggtgcgtggagtgctgctgcctggcgccctggatggcatcatttactatctcaagcctgactggtcaaagctggggtcccctcaggtgtggatagatgcggggacccagattttcttttcttacgccattggcctgggggccctcacagccctgggcagctacaaccgcttcaacaacaactgctacaaggacgccatcatcctggctctcatcaacagtgggaccagcttctttgctggcttcgtggtcttctccatcctgggcttcatggctgcagagcagggcgtgcacatctccaaggtggcagagtcagggccgggcctggccttcatcgcctacccgcgggctgtcacgctgatgccagtggccccactctgggctgccctgttcttcttcatgctgttgctgcttggtctcgacagccagtttgtaggtgtggagggcttcatcaccggcctcctcgacctcctcccggcctcctactacttccgtttccaaagggagatctctgtggccctctgttgtgccctctgctttgtcatcgatctctccatggtgactgatggcgggatgtacgtcttccagctgtttgactactactcggccagcggcaccaccctgctctggcaggccttttgggagtgcgtggtggtggcctgggtgtacggagctgaccgcttcatggacgacattgcctgtatgatcgggtaccgaccttgcccctggatgaaatggtgctggtccttcttcaccccgctggtctgcatgggcatcttcatcttcaacgttgtgtactacgagccgctggtctacaacaacacctacgtgtacccgtggtggggtgaggccatgggctgggccttcgccctgtcctccatgctgtgcgtgccgctgcacctcctgggctgcctcctcagggccaagggcaccatggctgagcgctggcagcacctgacccagcccatctggggcctccaccacttggagtaccgagctcaggacgcagatgtcaggggcctgaccaccctgaccccagtgtccgagagcagcaaggtcgtcgtggtggagagtgtcatgtgacaactcagctcacatcaccagctcacctctggtagccatagcagcccctgcttcagccccaccgcacccctccagggggcctgcctttccctgacacttttggggtctgcctgggggaggaggggagaaagcaccatgagtgctcactaaaacaactttttccatttttaataaaacgccaaaaatatcacaacccaccaaaaatagatgcctctccccctccagccctagccgagctggtcctaggccccgcctagtgccccacccccacccacagtgctgcactcctcctgcccctgccacgcccaccccctgcccacctctccaggctctgctctgcagcacacccgtgggtgacccctcaccccagaagcagcagtggcagcttgggaaatgtgaggaagggaaggagggagagacgggagggaggagagagaggagaagggaggcaggggaggggcagcagaaccaaggcaaatatttcagctgggctatacccctctccccatccctgttatagaagcttagagagccagccagcaatggaaccttctggttcctgcgccaatcgccaccagtatcaattgtgtgagcttgggtgcgagtgcacgcgtgcgtgagtacggagagtatatatagatctctatctcttagcaaaggtgaatgccagatgtaaatggcgcctctgggcaaaggaggcttgtattttgcacattttataaaaacttgagagaatgagatttctgcttgtatatttctaaaaagaggaaggagcccaaaccatcctctccttaccactcccatccctgtgagccctaccttacccctctgcccctagccaaggagtgtgaatttatagatctaactttcataggcaaaacaaaagcttcgagctgttgcgtgtgtgagtctgttgtgtggatgtgcgtgtgtggtccccagccccagactggattggaaaagtgcatggtgggggcctcggggctgtccccacgctgtccctttgccacaagtctgtggggcaagaggctgcaatattccgtcctgggtgtctgggctgctaacctggcctgctcaggcttcccaccctgtgcggggcacacccccaggaagggaccctggacacggctcccacgtccaggcttaaggtggatgcacttcccgcacctccagtcttctgtgtagcagctttaacccacgtttgtctgtcacgtccagtcccgagacggctgagtgaccccaagaaaggcttccccgacacccagacagaggctgcagggctggggctgggtgagggtggcgggcctgcggggacattctactgtgctaaaaagccactgcagacatagcaataaaaacatgtcattttcc

SEQ ID NO: 135 - DNA, 5922 bp, Homo sapiens
gcggccgcggggaccctcggcgtggtcctctgaccctgcaaacccgcgacggaggaaggggaggtcctgcccgaggcgccagcccgaggaggaggatgcccatttaacccgccctcgcctgccgggcgcttgcctcggtgcccgccgccggagcctccgagccgcgcccgtggaagtgctgcatggggcagggctgctgaagcgcggagttcggggtcgcgccgctcccaggcaggcgcgggagcccggtgcggcagttggcacagtttcggcggcgccttctgcgcgggagtggggggcgcggtgcgcccggccggcctccgcggtgccctggtgaggcgagagttatggagccgcccagctgcattcaggatgagccgttcccgcaccccctggagcccgagccgggcgtctcagctcagcccggccccgggaagccaagcgataagcggttccggctgtggtacgttggggggtcgtgcctggaccacaggaccacgctgcctatgctgccctggctcatggccgagatccgcaggcgcagccagaagcccgaggcgggcggctgcggggcgccggcggcccgagaggtgatcctggtgctcagcgcgcccttcctgcgttgcgtccccgcgccgggcgctggggcctcggggggcactagtccgtcggccacgcagcccaacccggcggtattcatcttcgagcacaaggcgcagcatatctcgcgcttcatccacaacagccacgacctcacctactttgcctacctgatcaaggcgcagcccgacgaccccgagtcgcagatggcctgccacgttttccgcgccacagaccccagccaggttcctgatgttattagcagcataaggcaattatctaaagcggccatgaaagaggatgccaaacccagcaaagataatgaggacgccttttacaactctcagaagttcgaagtcctgtactgtggaaaggtgaccgtgacccacaagaaggccccctcaagcctcatcgatgactgcatggagaagttcagcctgcacgaacagcagcgcctgaagatccaaggcgagcagcgcggtccggacccaggagaggacctggctgacttggaggtggtggtgcccgggtcccccggagactgcctgccggaggaggctgacggcaccgacacccaccttggcttacctgccggggccagccagcctgccctgaccagctctcgggtctgcttccctgagcggattttggaagattctggctttgatgagcagcaggagtttcggtctcggtgcagcagtgtcaccggcgtgcaacggagagttcacgagggcagccagaaatcccagccgcgacggagacacgcgagcgcacccagtcacgtccagccctcggactcggagaagaacaggaccatgctcttccaggttgggcgatttgagattaaccttatcagtccagacactaaatcagttgtgctagaaaagaattttaaagatatctcctcttgttctcagggtataaagcatgtggatcactttggctttatctgccgggagtctccagagcctggacttagccagtatatttgttatgtattccagtgtgccagcgaatctctggttgatgaggtaatgctgactctgaaacaggccttcagtacggcggctgccctgcagagtgccaagacgcagattaaactgtgtgaggcctgcccgatgcactctttgcataagctctgtgaaaggattgaaggtctctacccaccaagagccaagctggtgatacagaggcatctctcatcactgacagataatgagcaagctgacatctttgaaagagttcagaaaatgaagccagtcagtgaccaggaagaaaatgaacttgtgattttacacctgaggcagctgtgtgaagccaagcagaagacacacgtgcacatcggggaaggcccttctactatttcaaatagtacaatcccagaaaatgcaacaagcagtggaaggttcaaacttgacattctgaaaaataaagctaagagatccttaactagctccctggaaaatatcttctcaaggggagctaacagaatgagaggtcggcttggaagtgtggacagttttgaacggtccaacagtcttgcttcagagaaggactactcaccaggggattctccaccagggacaccgccagcgtccccaccgtcctcagcttggcaaacgtttcccgaagaggattccgactccccgcagtttcgaagacgggcacacacgttcagccacccaccttcaagcacaaagagaaagctgaatttgcaggatgggagggctcagggtgtgcgttcccctctgctgaggcagagctccagtgaacagtgcagcaatctttcgtcagttcgacgcatgtacaaggagagtaattcttcctccagtcttccaagtcttcacacttccttctctgccccttccttcactgccccctctttcctgaaaagcttttaccagaattcaggtagactgtccccacagtatgaaaatgaaatcagacaagacactgcttcagaatcaagtgatggagaagggagaaaaaggacctcatctacctgcagcaatgagtccctaagtgtgggaggaacctctgtcactcctcgccggatctcctggcggcagcgcattttcctcagggttgcttctcccatgaacaaatctccctcagcaatgcaacagcaagatggattggacaggaacgagctgctgccactgtcccccctctctccaaccatggaggaggaaccgctggttatattcctgtctggggaggatgacccagaaaagattgaagaaagaaagaaatcaaaagaactgaggagcttgtggagaaaagctatacaccaacaaatcttgttacttcgaatggaaaaagaaaaccagaaacttgaaggagcaagcagagatgaactccagtccagaaaagttaaattagactatgaagaagttggtgcatgtcagaaagaggtcttaataacttgggataagaagttgttaaactgcagagctaaaatcagatgtgatatggaagatattcatactcttcttaaagaaggagttcccaaaagtcgacgaggagaaatttggcagtttctggctttacagtaccgactcagacacagattgcctaataaacaacagcctcctgacatatcctataaggaacttttgaagcagctcactgctcagcagcatgcgattctcgtggatttaggaaggacgtttcctactcacccttacttttcagtacagcttgggccaggacagctgtcactgtttaacctcctgaaagcctattctttgctggacaaagaagtgggatactgtcaggggatcagctttgtggctggagtcctgcttctgcacatgagtgaagagcaagcctttgaaatgctgaaattcctcatgtatgacctcggcttccgcaagcagtacagacctgacatgatgtcgctgcagattcaaatgtaccagctgtccaggctccttcatgactatcacagagatctctacaatcaccttgaagaaaatgaaatcagccccagtctttatgctgccccctggttcctcacattgtttgcctctcagttttcattaggatttgtagccagagtttttgatattatttttcttcagggaactgaagttatattcaaggttgcactcagcctactgagcagccaagagacacttataatggaatgtgagagctttgaaaatattgttgagtttcttaaaaacacgctacctgatatgaatacctctgaaatggaaaaaattattacccaggtttttgagatggatatttctaagcagttgcatgcctatgaggtggaatatcatgtgctacaggatgagcttcaggaatcttcatattcctgtgaggatagtgaaactttggagaagctggagagggccaatagccaactgaaaagacaaaacatggacctcctagaaaaattacaggtagctcatactaaaatccaggccttggaatcaaacctggaaaatcttttgacgagagagaccaaaatgaagtctttaatccggaccctggaacaagaaaaaatggcttatcaaaagacagtggagcaactccggaagctgctgcccgcggatgctctagccaattgtgacctgttgctgagagacctaaactgcaaccctaacaacaaagccaagataggaaataagccataattgaagaggcacggcctcagcagaaagtgctccttagaatactacagagaggaagagcctgcatgtcgctggcccaaggctggaccctgaagctgatggaaccacctaatactggtgctgagctcctagtcacagcaggtggacctcgtgctcatcagagcatgccaatcctaagccattggacatatgtagactggtttttgttgttgctatgtacatataaatatatatataaaatgaacatagttcatgctttcagataaaatgagtagatgtatatttagattaatttttttagtcagaacttcatgaaatccacaccaaaggaaaggtaaactgaaatttcccttggacatatgtgaaatctttttgtctttatagtgaaacaaagccagagcatctttgtatattgcaatatacttgaaaaaaatgaatgtatttttttctccaaagaacagcatgtttcactcaatggtgaaaaggtggaaacatttatgtaactttatgtgtatctgtcttgatatctactgacattgtctatatgaggaaaatgattactggtcatgctcctgtgagttttttgggaaggtagggtcatttctccctgcctgctttgtgccaactagcatgttgcatctacatgcattatgagtctggttaggcattactttaaacatacataaagagacagtaggacattgtggctgagtctacccagctcaaggtaaaggagaatgttgctaattttttagcaaactagaccagcattattactcaaactaaaaatatcacacctgaaaaatttaatttaggacctaaaatgtctagattagctttctgctttttttatttgaataactcattcagttgtgaatgaattcctctttatttggtgccacagtcaccaaatgacaaggatttgccactttcccaccaaattgtgagtgcttgtaatttaggtctctctaccttaaattcagtataaggaaacgtaattatgattgattttttccaaagatgacaagctgtgttgaaatacattttttcttttgaccaattgacagaatctaataagctttaataatcttccccttttatgtgaaaagttttgagaactgtgaaatgtttaggaacaaactgttgaaatccattggaagggaaaaaagaaagtggtaccagtgttaccagctcaactaaaacctgcaattctgcatttcaactcttcacttcctcagcctacaaatagctcattagatgacattcacgcatgctgggtataggcaaggaaagtaattttcaaagtacatttgcagttctctttttcagagatgattctatgatagtgcctctgaaagttgatgcagcatttttgcctttccaaaaagtatttatcctcactgctttttgcagtacttgtattttcacagatggattatctggggtaattttcttcaaagggagtttgttatacacagtgaaaatgtattatagagtagaatagtaaagctctaggggtttcagaaagctttgatgaacagatgacaaacatctgaaaccccctccgcactgttacccagtgtgtatataatgacttgttatagctcagtgtgcccttgaatccatacagtttcttaaaagacaataaaatcttattaataaagttaatgtaacttct

SEQ ID NO: 136 - DNA, 7261 bp, Homo sapiens
ctgctccttgcaccccgctccctgcctggacacaggctcactcgctgccttcttctgggggaaaccagcttcttgccagccacagctgctgcctccgccactggccaccgcccctgtcctgggagtcccttggcccagacacccacctgacttagtggctcctctgcaggaaaggtggctgccccctgcgttcctccatccaaccatgagctggtgcccatcaccactgagaatgcaccaaagaatgtagtggacaagggagaaggagcctcccggggtggaaacacacggaaaagcctcgaggacaacggctccaccagggtcaccccgagtgtccagccccacctccagcccatcagaaacatgagtgtgagccggaccatggaggacagctgtgagctggacctggtgtacgtcacagagaggatcatcgctgtctccttccccagcacagccaatgaggagaacttccggagcaacctccgtgaggtggcgcagatgctcaagtccaaacatggaggcaactacctgctgttcaacctctctgagcggagacctgacatcacgaagctccatgccaaggtactggaatttggctggcccgacctccacaccccagccctggagaagatctgcagcatctgtaaggccatggacacatggctcaatgcagaccctcacaatgtcgttgttctacacaacaagggaaaccgaggcaggataggagttgtcatcgcggcttacatgcactacagcaacatttctgccagtgcggaccaggctctggaccggtttgcaatgaagcggttctatgaggataagattgtgcccattggccagccatcccaaagaaggtacgtgcattacttcagtggcctgctctccggctccatcaaaatgaacaacaagcccttgtttctgcaccacgtgatcatgcacggcatccccaactttgagtctaaaggaggatgtcggccatttctccgcatctaccaggccatgcaacctgtgtacacatctggcatctacaacatcccaggagacagccagactagcgtctgcatcaccatcgagccaggactgctcttgaagggagacatcttgctgaagtgctaccacaagaagttccgaagcccagcccgagacgtcatcttccgtgtgcagttccacacctgtgccatccatgacctgggggttgtctttgggaaggaggaccttgatgatgctttcaaagatgatcgatttccagagtatggcaaagtggagtttgtattttcttatgggccagagaaaattcaaggcatggagcacctggagaacgggccgagcgtgtctgtggactataacacctccgaccccctcatccgctgggactcctacgacaacttcagtgggcatcgagatgacggcatggaggaggtggtgggacacacgcaggggccactagatgggagcctgtatgctaaggtgaagaagaaagactccctgcacggcagcaccggggctgttaatgccacacgtcctacactgtcggccacccccaaccacgtggaacacacgctttctgtgagcagcgactcgggcaactccacagcctccaccaagaccgacaagaccgacgagcctgtccccggggcctccagtgccactgctgccttgagtccccaggagaagcgggagctggaccgcctgctgagtggctttggcttagagcgagagaagcaaggcgccatgtaccacacccagcacctcaggtcccgcccagcagggggctcggctgtgccctcctctggacgccacgttgtcccagcccaggttcatgtcaatggtggggcgttagcatctgagcgggagacagacatcctggacgatgaattgccaaaccaggatggtcacagtgcgggcagcatgggcacactctcttctctggacggggtcaccaacaccagtgaggggggctacccagaggccctgtccccactgaccaacggtctggacaagtcctaccccatggagcctatggtcaatggaggaggctacccctacgagtctgccagccgggcggggcctgcccatgctggccacacggcccccatgcggccctcctactctgcacaggagggtttagctggctaccagagggaggggccccacccagcctggccacagccagtgaccacctcccactatgcccatgaccccagcggtatgttccgctctcaatccttttcggaagctgaaccccagctgcccccagctccggtccgagggggaagcagccgggaggctgtgcaaaggggactgaattcgtggcagcagcagcagcagcagcagcagcagcctcgcccacctccacgccagcaggaaagagcccacttggagagtcttgtagccagcaggcccagccctcagccattggcagagacccccatccccagtctccctgagttcccgcgagcagcctcccagcaggagattgaacagtccatcgaaacactcaatatgctgatgctggacctggagccagcctccgctgctgccccactacacaagtcccagagtgtccccggggcctggccaggggcttctccactctcctcccagcccctctctggatcctcccgtcagtcccatccactgacccagtccagatctggctatatccccagtgggcattcgttgggaacccctgagccagccccacgggcctctctggagtctgtccctcctggcaggtcttactcaccttatgactatcagccatgtttggctgggcctaaccaggatttccattcaaagagcccagcctcttcctccttgcctgccttccttccgaccacccacagccctccagggcctcagcaacccccagcctctctccctggcctcactgctcagcctctgctctcaccaaaggaagcgacttcagacccctcccggactccagaggaggagccattgaatttagaagggctggtggcccacagggtagcaggggtacaggctcgggagaagcagcctgcagagcccccagcccctctgcggaggcgggcggccagtgatggacagtatgagaaccagtctccagaagccacatcccctcgtagccctggggttcgctcccctgtccagtgtgtctccccggagctggctcttaccatcgctctcaatcctggagggcggcccaaagagccccatttgcacagctacaaggaggccttcgaggagatggagggaacctccccgagcagcccaccacccagtggggtgcggtcccccccgggtctggccaagacacccctgtctgctctgggcctgaaacctcacaacccagcggacatcctgttgcaccccacaggagttaccagaagacggatccagccagaggaagatgaggggaaggtggtggtcaggctgtcagaagagccccggagctatgtggagtctgtggcacggacagcggtggctggaccccgagctcaggactctgagcccaagagctttagtgctccagccacccaggcctatggccatgagatacccctgaggaacgggaccctgggtggctcctttgtctcccccagccccctctccaccagcagccccatcctcagtgctgacagcacttcagtggggagtttcccgtcgggagagagcagtgaccagggtccccggacgcccacccagcctctgttggagtctggcttccgctcaggcagcctgggacagcccagcccgtctgcccagagaaactaccagagctcttctcctctcccgactgtgggcagtagctacagcagccccgactactcacttcagcatttcagctcctctccggaaagccaggctcgagctcagttcagtgtggctggcgtccacacggtgcctgggagccctcaggcgcgccacagaacagtgggcaccaacactccccctagtcctggcttcggctggcgggccatcaatcccagcatggctgcccccagcagtcccagtttgagccatcaccagatgatgggtccaccaggcactggcttccatggtagcactgtctccagcccccagagcagtgcagcgaccaccccggggagccccagcctgtgtcggcacccagcaggggtctaccaggtttctggcctccacaacaaagtggccaccaccccggggagtcccagcctgggccggcaccctggggctcaccaaggcaacctggcctccggtcttcatagcaatgcaatagccagccctggaagccccagcctgggccgtcacctcggagggtctggatctgtggttcccggcagcccctgcttggaccggcatgtggcctatggtggctattctaccccggaggatcggagacccacactgtcccggcagagcagtgcctctggctaccaggctccttccacgccctccttccctgtctcccctgcctactaccctggcctgagcagccctgccacctccccgtcaccagactccgcagccttccggcaagggagcccaacaccagccttgccagagaagcgaaggatgtcagtgggagaccgggcaggcagcctccccaactatgccaccatcaatgggaaggtgtcttcgcctgtcgccagcggcatgtccagtcccagtgggggcagcaccgtctccttctcccacactctgcccgacttctccaagtactccatgccagacaacagcccggagacgcgggctaaagtgaagtttgtccaggacacttctaagtattggtacaagcctgagatctccagggagcaggccatcgcgctcctcaaggaccaggagccgggggccttcatcatccgcgacagtcactccttccgaggcgcgtacgggctggccatgaaggtgtcttcgccacctccaaccatcatgcagcagaataaaaaaggagacatgacccatgagctggtcaggcattttctgatagagactggccccagaggagtcaagctcaagggctgccccaatgagccaaacttcggatcgctgtctgccctggtctaccagcactccatcatcccattggccctgccttgcaagctggtcattccaaaccgagaccccacagatgaatcgaaagatagctccggccctgccaactcaactgcagacctgctgaaacaaggggcagcctgcaatgtgctcttcgtcaactctgtggacatggagtcactcactgggccacaggccatctctaaagccacatctgagacgttggctgcagaccccacgccagctgccaccatcgttcacttcaaagtctctgcccagggaatcactctgactgacaaccagagaaagctctttttcagacgccactaccctctcaacactgtcaccttctgtgacctggatccacaggaaagaaagtggatgaaaacagagggtggtgcccctgctaagctcttcggcttcgtggcccggaagcagggcagcaccacggacaacgcctgccacctctttgctgagcttgaccccaaccagccggcctctgccatcgtcaacttcgtctccaaggtcatgctgaatgccggccaaaagagatgaaccctgccccttgcccagggccagtgccatggggaaggggcttgtggggaggggacccatgaatcctgaccactcttgaacccagaaggaggactttgggccaatttcggaggagagaagaaagtgcaacgtggggagagggaagtgaattgcagaggggagggggaaaagagagagagagagagagagagagagagagagaaagatggaggagaagaacttggattcccctgggtagatggaaactgcaaaaacccaaagcctccaaaactaaccaggtccacctaacaccccctccctcccctaagaagatggatgtcctcaaaagagaaggaacaaacctccttgggaatccacattttttgggggaatggaaaagctctgtctccctaactcaactgctttgcaaggggaaatcaagctgggagaatctttttctggccacctgtggggtaggttgtcaaaccaaacagagccaccgtgggacatcaagtggaagaacttgtttgcttgaaagtatctcagacccaaggcacctcaggtctctttgctgtgcctccactatattgtcgtgtgggtgtgtgtctgcacccacatcctcacacattgatctagatctgcctttatccactcgaattataaacagctcggcttgtccttgtcccatgtgtttgtagacacacatgcatactgtccaaagattagggttggtggtggcagtgcagcaggggagggacaaacaaccaagctatgggtgacagaggctctctcctggtgcctgcacctgcactctagtgaccctgggtgccgccagacccttctcttctacaaagaccccagcaggagtgggagggtctgcaatggcatcgccctgtcctgccttggccagaagcctggagctttggtttgaggaggtagagatatgtgtatccataggaagagatctgtcagaacaggcagctgttgagctcggggtgtcttccccaaggcatgtggctcagcagcaagaaaggcaagttgctcctgctggggccctggactctgccttagctcccacctctcagccttgttattgggtttcatgcccctggaccagccttatctcagacctgcttacctgcatgatgcctttttgggggctggggattgagtcttgctgctctgcccagccctgttctattctgcagggtccctgtgttggaattctccctggggaacctactttctgctcagtgaggctccggccagaaacctggagtccttatcctcccctctgtaagtgttttagggtctggcttttgcaggcaccctctgacctcagcagagctcctgggcctgctgcctgcacaccacatcgcctacctacaatgccaaagcctcactgtcaccctttctgccttggtttccctagctgagccacgctgcccatgcagcagagggcagaaggcttgcacttgggccaaagggcctaaggtccactggacagttgggaaaacacctgaccaccatttaaggactctaagccagaatggaaaattcaccaggactccattcttaagcctatgcgagtcccctagagagaggcattgtactgatatataaatattatataatatatacatgagacatactgacagaatctgtaagctaataaaatgtaagaaaaggttaaaaaaagaaaaaaaaaaaa

SEQ ID NO: 137 - DNA, 2357 bp, Homo sapiens
attggggtttcattgttcccgctgggccgggcggtttagtgtaattgccgccggaggaggaggcggagtaacctctggtcagccgagaaaccccactatcctgtagccataaccgcttaaacgatttgggaggtagtgaagggcagggagctggacctggaggcgccgccgcgacagcagcagccatggaggacgagatgcccaagactctatacgtcggtaacctttccagagatgtgacagaagctctaattctgcaactctttagccagattggaccttgtaaaaactgcaaaatgattatggatacagctggaaatgatccctattgttttgtggagtttcatgagcatcgtcatgcagctgcagcattagctgctatgaatggacggaagataatgggtaaggaagtcaaagtgaattgggcaacaacccctagcagtcaaaagaaagatacaagcaatcatttccatgtctttgttggtgatctcagcccacaaattacaactgaagatataaaagctgcttttgcaccatttggaagaatatcagatgcccgagtggtaaaagacatggcaacaggaaagtctaagggatatggctttgtctcctttttcaacaaatgggatgctgaaaacgccattcaacagatgggtggccagtggcttggtggaagacaaatcagaactaactgggcaacccgaaagcctcccgctccaaagagtacatatgagtcaaataccaaacagctatcatatgatgaggttgtaaatcagtctagtccaagcaactgtactgtatactgtggaggtgttacttctgggctaacagaacaactaatgcgtcagactttttcaccatttggacaaataatggaaattcgagtctttccagataaaggatattcatttgttcggttcaattcccatgaaagtgcagcacatgcaattgtttctgttaatggtactaccattgaaggtcatgttgtgaaatgctattggggcaaagaaactcttgatatgataaatcccgtgcaacagcagaatcaaattggatatccccaaccttatggccagtggggccagtggtatggaaatgcacaacaaattggccagtatatgcctaatggttggcaagttcctgcatatggaatgtatggccaggcatggaaccagcaaggatttaatcagacacagtcttctgcaccatggatgggaccaaattatggagtgcaaccgcctcaagggcaaaatggcagcatgttgcccaatcagccttctgggtatcgagtggcagggtatgaaacccagtgaataaggactccagaatctaaagccagtggcttgaggctacagggagtgtagtaaagccgttgtttacttaaagatttatcaaatcagtcagtgcaaatgtcagatacaatgtattcatttaaaagattcatttttaatcatgaaattacttatcatccacattgttttaaaaagaaacaagatgctggatgtctgccaatttttgccttcattaccttttttgataaagtttctcagatccttgtttcaaacacaaatgcagggattgctgccactttttaactattaagaggcagaaaattgcacaatattgaacttttttccactgaagtagtgtgcagttctagtttgcattcctgatatgatttaaaacatgtaatataaagatgttaaaaaaaaaaaccaaaactgtgcagagtctagaagttgtttgtcatcttcagcttgtgcacaattctgttttaggttaaaaaaaggcattgtttgagctgtcccatctccactgttatccctttgggttttttaatataaattattagtttacatcatttttgtatctacatcttttttcacaaatttgtcttgccttattaaagttctgtaaaatatacttaaatggaaaaaatgatgttcatttagattgaaaacttttctcagatggattgataattgcattcatcttgtgttttatatgagaaggtgcctcaagaatttcctgttggatttgtttaaaaggatttttatctttcgtgataaactttgctgtgtaccaggaactataaaaacaaaaacttgttactaaagaaaatatctgaaatgtgataagttcttatgccatgttaatttcatgtgtcaacttcaacatttacatgtattatttcattatgtaaaatgttttagcaatttaatattttgcacagttagcaaactttgtatgtcatttccttcaaggcatcatgcagagttgacatgagatttataaggttttaagttgtttgcatgtgaaaatcaaatacatactttggtagtctttgaaaaaaaaaa

SEQ ID NO: 138 - DNA, 461 bp, Homo sapiens
aaaaaataaaaatcatttatttaaacaaaaatatacacacagtgtacaatgaatatggtttacacagaacaataaaacaaaaatgatatctcttaaatgccaacataaaatgatctatttatgcctagaaaaaatttctaggaatacacattattgattcatctaaaatacatatataacataaaaagaaaacaaatgccaacctttcagatgagtaccacaaaaacctaaaagttaaatgttagattaaataaaattataaaatatccacacgagaagtatgtgtatacaaagtattgtatgtatgcagtgaaatgagagtgcccatacagttatatgcaaacttttgaaagtttcatagttgtttaacaaaatatttttaatgttgatagtgacataaaaacatcacaagaattatctagataatatagcaatattgccaaaatttgagtcaatgttac

SEQ ID NO: 139 - DNA, 2594 bp, Homo sapiens
gggagacggtgcgggcggccgggagcgcagccctccgggaggcgggtcatggcctcggcgccgcccggggagcggctgcgcgaggatgcgcggtgcccggtgtgcctggatttcctgcaggagccggtcagcgtggactgcggccacagcttctgcctcaggtgcatctccgagttctgcgagaagtcggacggcgcgcagggcggcgtctacgcctgtccgcagtgccggggccccttccggccctcgggctttcgccccaaccggcagctggcgggcctggtggagagcgtgcggcggctggggttgggcgcggggcccggggcgcggcgatgcgcgcggcacggcgaggacctgagccgcttctgcgaggaggacgaggcggcgctgtgctgggtgtgcgacgccggccccgagcacaggacgcaccgcacggcgccgctgcaggaggccgccggcagctaccaggtaaagctccagatggctctggaacttatgaggaaagagttggaggacgccttgactcaggaggccaacgtggggaaaaagactgtcatttggaaggagaaagtggaaatgcagaggcagcgcttcagattggagtttgagaagcatcgtggctttctggcccaggaggagcaacggcagctgaggcggctggaggcggaggagcgagcgacgctgcagagactgcgggagagcaagagccggctggtccagcagagcaaggccctgaaggagctggcggatgagctgcaggagaggtgccagcgcccggccctgggtctgctggagggtgtgagaggagtcctgagcagaagtaaggctgtcacaaggctggaagcagagaacatccccatggaactgaagacagcatgctgcatccctgggaggagggagctcttaaggaagttccaagtggatgtaaagctggatcccgccacggcgcacccgagtctgctcttgaccgccgacctgcgcagtgtgcaggatggagaaccatggagggatgtccccaacaaccctgagcgatttgacacatggccctgcatcctgggtttgcagagcttctcatcagggaggcattactgggaggttctggtgggagaaggagcagagtggggtttaggggtctgtcaagacacactgccaagaaagggggaaaccacgccatctcctgagaatggggtctgggccctgtggctgctgaaagggaatgagtacatggtccttgcctccccatcagtgcctcttctccaactggaaagtcctcgctgcattgggattttcttggactatgaagccggtgaaatttcattctacaatgtcacagatggatcttatatctacacattcaaccaactcttctctggtcttcttcggccttactttttcatctgtgatgcaactcctcttatcttgccacccacaacaatagcagggtcaggaaattgggcatccagggatcatttagatcctgcttctgatgtaagagatgatcatctctaaaattctgttcccaagatgcagtcctagcgtagcgaacgttcctggagtggggtgaaggatatcaatatactaagttttaacagataccccatttaggtcagcacttgattcgttgttgctgtgaaatatgtccatgggacaaaagagggaatatgaaatatttgcatatgggaagattatagagcataataattttgtaaatggagcaatctcaacctctatttctagatcacattttcttgatgtcttccttcaaattaatgaccttggattacataaggatttctatgcattcattataatttgttattcctttcaatatccttgtatttcaaatcttccatataagaattagacatggcaattcttaaattgattcagaatggtctgatactattccagtatcacctccttaattctgtttctcctcgttttcctgattttccttctcattctctccttccccgctctgtctctctctccctgtcactctctctctctcgttccttattttttgtttcttacctcttactgtttaacctgttgcttccttctggattaatacatttagagccattcctttatatggtcacatttcctatgactttactcaattacttttaaaatcctttctattctgagactaatttttaagaattacaaagctcattcttctgaatctaatatcactaactcctagactttttccgttttctttggatacactttaagtaggaatttatcagaattttcattcaactcgttctttaatgcagatatttactagttataagaccttaaggctgggtgcagtggctcacgcctgtaatcccagcactttgggaggctgaggcgggtggatcacaagctcaggagttcaagaccagcctggccaacatggtgaaaccctgtctctactaaaaaaaaaaaaaaaatagaaaaattagctgggcatggtggcaggagcctgtaatcccagctattctggaggtggagacaggagaattgcttgaaccctggaggcggaggttgcagtgagccaatatctcaccactgtactccagcccagtgcgagactccatctc
